United States Patent Application Publication US 2026/0327638 A1 - sequence listing, part 2

SEQ ID NO: 1183 - DNA, 10290 bp, Gremmeniella abietina betaendornavirus 1
  source 1..10290: mol_type = other DNA
atgcataccaacacatacaacaccacaaacccaatcaactccccaaacgccgccatgaacaatataaacaagaggaaggctggcctctataaatccacagccaacaaaaaccactcacgtaacaatgagtgtactgagcctaagggaattaggcccagtttcaaagattggggtagcattaaaaaagtttctagaacaaaaatcgttaaaggaactagtgatagtaaagttgaaattaagaacaaagtcatggctactaactcctgttggaactcaatatttgggtacgatttaggcgtagatgctatgattgacattgacatgattaaaatgtctcttattggccaagaagaagatgccgagcatattaggctccacgtaacaatgcgcaagggtatcttacatttcgaaaacccaattggtttaccaactggcgacccatctcctgaactgtttgccaagcaacgagagtttgtcaaaacatataaaggagaaacggtaggactgctcgatatattaaacaagcatgatggcaatacacttgtcggattaagtgaagaaccattacttgatagaattgctaaggatgcaggcatctccatacctcagattactactagccaattcaaaaccgagatggacaaattagtcaatacacggttacagcatgcggctaccaatcatgccaccaaagttattctccttccaacaagtacgcctgttgacattgttgaagaccttaataacttacacggttccggttctttcgtacgtggcaacatggcagcacatagtcatatttatcaccatgctaaccgcctaatgctaacagagatgttagccagtagacacccgcgcaatgctttactatacgacataggtggtaatatcaaycgtcacttagatcatggaagattgaatgttcattgtgtatatacaacttcgactccagctgatctgagccgtcacactttatgggtaaagaaagccacacaatgggcacatgctaacctaaaaaacaagagcgtacatggtgctacgtactcaagcattgctgcatccatgataaaagaagacaactcaatgtggtgcactaacgggatagctaactgcagccatgcacccatatcagttggattcgcaatgtccattgacacattagtccatcttgacccttcggatttgataaaattttatattgacaacaatgtggcacatgcttcacatgccatgactatacctgataactatgcttatgccacaaaaggagtcttgcgtcataatgaaggtcattggtacaggactaacaatggtacttgggtcattgagtttgttggtgaaagtctcagctatgaacaaaaggtttcatataccgatgcatatttacaaactctaatctttactgctggagaaatggctgtatataataaagttgttggacgcaaaggcccacatatgttatttgaacatttcttaattacacgtgctaaacttgagtctgaatgtattaagcatgtcacttggtttaatatgaacatggatgaaatctttgttatgatacctgaaatagattttgattcagctgtcacattgatgaaacgtgaacctttcactatgaaaactgtctcaataaatctccgattttatgaacgccttttgaatagactattgcaagaatactcctgggaagcaactatggcatacgcgtcctcaatgattggtaaagtatatgctacatcatcgggattgcatttaaaatggaatatgactaatgctgaagtccgtgatcattgccttgttgcttattggtcaactaaccgagttaatgagtcaatgcggcctcttatacagcaagctgagcgaaataatcgagacccagattttttgactggcttgtggactgcagtcaagaattggggtagagattttggcagccattttgacccatctggcagtgaactaattcaaacctttattaaaaacaacaaaggtaacgtattacacataaccagacttttcggagctactagtaaatccattgatagtttgaatgttgcagcccaaatggttaagtcaagaaatgttttggaatggataggtagctcaacaggtgtagtagctaccacacgcaatgatttgatagatgattggcgcctagctacaccttcaaagaatgagataccaacagtatatgatttagcttatgaacgatcagctccaaaaagtaaacgacaagtctgtaacgcaagcgaaatttgtccacatgatcactctacttaccatcaacacttaattccaggcacaactgacattgaaggtaattgttcttgctgtaatgtatatagcaatttagctcctaacggggcttgtagagtttgtagcccacggccattagttcgtggtaaacagttaagatgcacacataaacatatttacgtgaatgatagctgttgtggccaagcaatatgtaagtgcaagcattcacacacatgttcatgctgcgggcttccatcaaatgctcagttatgtaaagtttgtaattttacgccaattcaggacattattggagacaagtatggtcatcttagtaagaatgatgcatcattaaatgatgtagtacacacttcagataaacttaccaagatattaaaattaagagacaacaatcaaaatccagatgtagataatgaaaatgatagtgaccttggttcatttgatactcctattaaagctcccaaattggctaaagaatttgaagtaaagtctcgcccactttccgttgaatcagcaaacttcgctgatgtgatagctgaacttaaaactcacaaagggttaaaaccagtgaaagagactgacaagaaggttatcgaaaatcttattgttactgctaaacagagtgacaacgaagtactggattgggcagatattgtcaatgaagaagccaacaaagaggcggaagaaactacgcaagttgaacctgtagttttaaatttaatttctgaagaacaagcgaagccaaatagtaacactgaattctgggctgaaagacctaatatacttaacaaaaaaccagtaacatccgtgaacttggttaaaattgatgggataccattcgtaccgattagcattgttggttgcaatgtccatgggtttattgatgtaccaggggatggtagatgtggttcacatgctttaaaacactggttaaaatgtgacattgctgaaattgatagatgggctgaaactgcgtttggccgaaatgattggctcgaaggcgaagagatcgctgcgattggtaatgcttacgggaggaacgtgttgattgtaacagaaagcatcagtacattataccaggttgattcagagcgtttggcaatagcaattgtacatgggaactgtattggtaaatctatgcactgggttgtcggtgatgtcagtgtgtcaacagttagctcaacattaaataacagattatatgagaactatttacatttgattaagtctgcagctaatactatgaaagacagacatgatactgcatatggttatacacacgctgaactcgacattgagttcatttgttccctaggtggtactgtaactcttacgcccagttcagttaatgttaattttaccggtatgaattcagagccgataatacaaacattaaacaatgggatgcggttactttcagggccaacaggctctggcaaaactacacgagcttttgaaatattacaagagaaattattaataattactccatcgcgttccacagtaatcggctcgtctaagctaactaaaactaaaaactgtgggcgtgcttcaagccgctggtggcctaaggaacatatgacagtaaatgaaataaatgcttgtgatgttgtatacgtaacggttgatgccatgcatgctgccttatctaacaacgaacattcgatgtaccatgaccttatcaagtcaagacttgttatctgtgatgaaatacacgaaattacacctaactacatggaagttgtcactcatttgaatattagtagaactattttagcaacagccaccatgccaggtgtagccacgcggcataatttaaaatataataacactgttgaatttgtaagtaatggactcattgaagctattgttgatgagaaaacttctaatggcctatctgatggccaaaccgtaatagttgcaacaaaaaaaaatacatatgttaatcaagatattacagcaattaattctgacacacttaacactattgatctaagcaaatgtacaaaagcattcgccactaattgcgtcaccacaggagttacgatgccccttctgacagaattgattgatagtggcaagcgatgtacagtcaatattaattattcacccacttttgatggcaagcttgatcttttcaggtcacatattcgacagacgtcaattgttgaatttaaccaaagtaaaggacgtgtatcacgtacacacccaggtagatatgttacccctataccaacacaaaaaacagaaatgtcaattgatgatttgctcgcttcgtcagctttaactggttgcccttgccctgacaaattcgctcaatactggtctaacttgaaccaatctatcctgagtaaagcccaagataaacttgggaaaatacctgttaaaactgggagcttaaaagaccatgaggatagagttaatctttctacttggataagcagatatggtaggttattggagctaaaaaatagaaaattaaagccaacatttgttagttcaaatatttatcgagaagacctagttaattttatccctagctgtatcgggacaaaaaacaacatgaaaaccaaacatgttggttattttaaagctagaattaacatagataaacaggctatcataccaaaagcaatttttggtaacacaaaaggtcttgattatgatacgttgacagtagcagttgagagcggcggtgactttattgatattgaaaatgatgatatggaaaatattatacccaaagttaaattaattcttgttgctcaaatcactaaggctatcaagacaattaataatagtatgttagcaatacttaattcacgtagtttaaatgctgccccttctgactgtcctggatacagaggccacaaatcaatgctgaaagcaactggccgtgtacctaaattaaatgatatggtcggtgttgttgatatcaacactggtataggtgcaatccagttatataaagatgcccctaaacaggatgaaaatgctacttgggttttaccaacttacagaacggcacaacttcaagatgacatgcgattactaaacagtgctaacagcaatattaaaatcgttgattacttgcacaattgtaccctctatgctgggccacctgggtcaggcaagacacacagtatgttgaacacatatggaaatataccaatagtaacaacgagtgaaacgcaattaaaattacacaatgattggactactccaagtggtgtggttaactacgtgccaattataggtgttgatgaggcaggtctaataacattaagcacgttattaacattaattgccaaagctgacaaattgatttttacttgcgacgttggtcaaataattaacaaacaagagcagaatatccaagaactaactggtattgatagtgtagcacatctattaatgaaattctgcaatgttattactttcaatgaatcttacaggttaggaaaaaacatttgccaagtggtaagtaagctgggtacaaaattaagtagtaaacgtgagcaggatgatgaaattgtaggcatttcatgtgttattggcaacaatccagagttcagtaacgccattatcaattctaaccccgacttaataatatgcgcaacaaataatttggctaggcaattgcgtagctttattgacattaatataactactattacacgatgccaaggtgctgatgttaaacgggtattattagtcatatctggtattgattaccgtaacataggaaacgaaacattgtatgtagctctgacacgtcacagtcaacacattacgattgttgttgaccgtcctaacattaatttgcttggttcactagaaatagcaaccaatgactttgttaattactcacgcgccgtaggtggtagctctaatataacttcacgcatgtatgattcaattgtcaaaaaatcaagttccctgcctatgcctgatgcccaattagaggatatactcaaacaagcattgtatatatctaacaattttgctcataaccctgttgttccgagctgtattatatctaaggttgggaaaaatggcctactacaaggaaacttatcagtcatgggcctagatggtgctgtgcataacaaatttatcacattaactgtgtttggcttaaaatattctcgtcctgtagtattattctatggtatgaaaatagaagaattaagatataagctcttaagcgacatgcctgtgaggcgttttatgtgtctgttggtacgccaagtaacttcgcgattttatgcttatggccgggactttgttgttttactaaaatcatggctcacattggctttagagaaaactagcgaatgggcagcgacaagccatgtgatgcccagtattaatgaagtagtcagttcaagtggtaatatgttgatgaaaattttaacaatttttatgactccagtaacatcactcatttcaattttacctacattgaaacaaacattaaagaaattattcaacaccagcggcgacagcctaggtagtgatgcagctaggctgttacatgattggatgtttaatccctcgagcagtaaaacgaaatcaggtggaaaagttgatatactgtcaagcttgtacgatattattatcatgtcaaccaaaaccgcaatcagtggagtcaaagaatttatcgtatgggtcatcgagtccatgaaacttggcttcacatatgttaaaaataaattacagcctaacaccttagatgattctgatgtgttatttgattatgatgttgaccagaataaggatctatacactgatgaagaaaagcaattatttgaacacggcaatgctgttaacgttaacaacacaaataatgaaccgcctgtggttccatctattaatgtagaggaatacgatataattgatgacaccgactcaaaacccagtataccacaagaaaaggtggtagaacctttgcctgattactcaggtgaaagttggggcaatagtagtattgacccagttaatctcttaaaaccaactgacatcccattaccaacttgccatgcgaaaactttaattaaagtagataaaatcaagactaagttggatattgaaacattcaaaccaaattttatggggcgtttcttaattaagcgtgacgacataggattaagtggaaacataccattaccaggcatgaaggttaagttttccatacataaaacatgtgagcattattatactgtcaacattattagagacactgagataattgaagtttatttaaagaaacgctccacaggttatgaactatttgcaaatcaagacactgctgcagatattgatccccaacatattcgcacggctctagttgccttgaataagttgggcggcggtgaatcagcttttattacactactaaaatctataatgcaagctacatctgatttcgttgaaaaattgacgcacattattaaatggaacacgcgacgtttgttaggacaatgccagcacaagtcattccaaacggatctaaatgtgatcgatacataccgggcttttagcactgcattgaacagatcgttctatgggcgcacccacaaagggaaattcctatctggtacaatcatcacaacttgttacgtgaagcctgaggtggaagataaaatgcaagagagctttattctaattaacggtattggatttgatactcgggtcacaatatattcttttgaacaaattgatgaaagcttattacagatcatggctaattcactgggagcaagagctgctgatcacattggaggcaagtccaagtcatttgattcattgttgcgtttaggtgttgacttgaaagctttaaacactgctatcactccacaagatgtcaagtatatcaagagacacatcgagaaaaatcccttagttgcaacttttgattatgggcctgaacagacacatatggatatgaaagcgctaggtaaattgatgtctgaattaagtgtaaatgcacatgtggatttaaaaaacaaggtcatgcaaaaaaccgcattcatcattcccagtgggcatggtaaatcgactacagtacgacgtttacgacagcaaaaaccacatttgcgtgtgctagatgctgatgaagtacaagagcaagcaacaattctattattgcccctagctgataagtttaagtcatacaagtacaaaatacaagaacatgtaaatagtacaccaactgatgctgtttttgtccatgctattgattgtgtgcctagtgggtacaagcctatattcattatgaatactaaagcagaggtaccgttagatcgtgtttggtcacgtgaaaatgttgagtataacgagaggacattggcaaacttaacattaattaaagcagatggttatgatgagttgtataaagtgattagccgaatattagatggtggtgtgcgtgatttcatgactttcacagattacggtatgttaattgacaatatagatgatatagacggatataatttctttgctaacgaaccatatactgatgatgtcatacgattaccagctggcaaacatgataaacttacttatagcgaggtgagacatggcccaggacagcagcggttgttcgtttcagggacacatgtaggtttggcaaggccaactatacaatctgtagcaagttcactaccaaatgccattagcacaagattgatgggtcgagaaagtttaagaactgaagctactactattggccaataccatacactaatgcaaaggttgtggcacccaaaagctgaagaattatttaaaatttttggtgctgaccaaatttcgttaagtacgaacatgctcatagaatggttagtaaataagggcaacaaaatgcaactattcgatgatatgctgagagatgtgcaagcacgtgaatatgcaactgaccctaaggatgttaccgttcactataaagtggagaatttactaaaagaacaagtgaatgacgttttggaccaagtagggcgtgttattgtatggaataaccagaatatcaacatgtttgcttgtcccattattaatgaggctaaagctaggttaaagttattattaaaaccaaatgttgtatatacagatggtatgagcacaccagctctaaacgcaaaattaggtgaatataaagcaaaatatatattagaaatggacttaagtaagcaagatcgccaaactgataggccaatcctagaatatgagtggtggcttgttaaaaatttaggagtctctgaaaaggttatagattttttgtctagtcctataccaacattcaatatccatggttctaacggtgagacagctagactacctgcgatccactttagtggtggagcaatgacaagtttgggcaacgaaattcgcaatcttgtgttggtttctgattgtgtccaaaaatatgtcgccatttttactttaggtgatgacagccttgttctgatgaatcaaccaccccaacttgacctttataatcgtatctgtaggtcaaggcataacgtcacaaatacagccgattggtcaacttcacatggaacttttctacaactgatagtaacacgagatgatgatgggttcttttacgctagtcataattttagcagattacgtgaaaaactagcttacagcgcatatccaaatgattcgctagaatggaaaatgaaatttgcctcatatttaatgatgatagggtattgtcctgctaccagaaatgcgatgcaatattcaggatttgtcgtatttcccgacctcggtacgacgttatcacaaagactagaagcgaatgcgattgccaataaatgcacggttgaagcagttttagccgtaatacaagatatgatgcatatcaggctcgagaaatcaacaccattaattgtgaacacgaccacaattctaaaaccaaataaattgaagagtggttacaagagaattggtgattatcaagaagatatcactttcaacaaacaactggctgcactactttcctcgttgtag

SEQ ID NO: 1184 - DNA, 9447 bp, Rosellinia necatrix betaendornavirus 1
  source 1..9447: mol_type = other DNA
atgacggacaacaagcaaaacaacggacaagctcatgcaaatgagcttgtccaaatggacattaagcaagaaaaactagctaagtaccacaacttagccactaacaacccagagttgtttaagtttgcaaccgatcgggttaacgttaaatccggaatcactatgggaggtgatggcagctgctgggttcgaatgtgtaggtacactattaaccctagccaacctcgccccaagtttggcgcattcgctcgtgggaagccatatgattggactaagttcatccagtttgacttccctgatgatgaagatgaagaacccacggtcagacctattgaccttgaaactatgcgcactattgctggttgtttggaccccaatgtgattgtagagctaacctggaatggcgacaacttgcacttgatcgagagccacctgatgcgttgtcaccacctgaaattattcagcaatggcaagcactgcgatgatccgcaagaggacaagattggcctgacctttcaacctttgatgggcactaaagatgggaaacaggtgcattgtcatgataatggtgtaccggtctatcgctttggtcgagatatacttctggatttcattgacttggtggaatttaccaacaagggtgctatgcttggccttacaattaagcaaatacaagaggttcttgagaatgacaccatcctccaaggaaaaataacaaccatnncggaattcaagaacgcaatagttgatctggaccggagattggtgaacagtgtgacgaaaatcaacctcaacaacagcttaactgtacccatgtcagtgccgaagaacgtgttggatgaattgaatgtagcttaccctgatttcttgtatgtgatgaacccaaaggcacatcataagcacccgttcatggccattagccgccaaaccttgaataagcgtatcgtcaacaacacaccaatcaatgtaccaatattcgatataggcggcaatccatccttccacttggcgcatagacatacgaatgtgcactcatgctttgctcgggttgacaacaccacggaagcgcgtgctattgaccacgaactcaacactttcaatgaagttaatatgcacgcaatacgtaacactaagaacgaatcgcagcgccccaacgtattggttgaacaaatgtttgagtcaattaaagatggctctgacttacattattgctatgaacgagctcaagattgcaaggtgtcaccgaaacatgcagcggtagggatgatgatagattccatctataacatcacccccgatgaattgataagcatcatgtgtgccaagagaatcgtaaaactaaccaatgccttcacgttacctgctgactattttatagctgaaggtggccagttggcctttaatgagggacactggatcaaaacaaaacgggacttcaaaatggtcactaatgatgatagcctcgtatacaccgggcctcgcgagaacattgagttttggttcaggtcccctatagtgcattgtaataactttggtgtatactcaagattcaaaggtaggtcaggaccccacgtgatatttgaacattacctactgacaaataccgacatgacggagaaaaccatggagtttgctcactgggtaacaggtgattctgaagttgaactattcaacatacctgatgtcaattataaacagccaattagcctgacgtttgtcaaaccagtgacatactctcaacgcagaataaatctacgattcctgcgccgattgcgtcaaaagttgctcagcaacgaaccaagcatacaaatgctgaacgaatacgggcagcaattggttagccaagtctatttcaattcaaagaatgaatttaaagcctacgatattcaagctgacgacataaattaccacagcatcgtagctcttatgatgcaccagcgtatggtagagagtacacaggacatggttgaaacctatactgaaagaagagggttcgacaattggtggacttcggtactgggcagtttaaagaattttgctcagggcctcggataccaatttgaccctagcactaacgctatgttgtcggaattcgtagaaaattgggcccagaaaccaaatacagagatattcaagattacaagtgcttggtcggatttaattaagagtgtgaccaagagtatggacgtatcaacaaactgtgtgatactgacatcaaaattgattgtcaagcccttcacaattattaacccaccagaacttgaagacttggcagtgaaaaatagcagccaatctttatccgatatggtcaaccatgatgggccgcaatacacccgcgatgaatgcaagcaacattccgactgtatccatgatcacaattcccctcacaatcatttagtgttaggagtagaaggcacaccttgcaaatgttgtcagatacttagccaaactgtcaacggattttgcagcttgtgtcttaacgatcaattctgcaattcttatcactcagagtgcccccatgaacataaattgttaagtgaacattgctgtggaagagcgtggtgcaactgtaaacgaacctttgtgtgccaatgctgtggcattgcctcgtcgaccaaaaattgcccggtctgttttgatgacaaacatctcaatgtagaaccgaccgtcaaggtaggcgctgaagccactgaagctaaacatgggcgtggtcattcgaaatctgaatcaaagaacaatgaaacaccaagtgggggttcagatggttctgaaaccaaaaagcctatgaacgaacaaccacctaaagctccgcaaagccaaactaagactaaagcctcagttaataccgatgaaccaaaacctagcacaactaacttaccgacgccttcagtaaaagttaaccaaggtgagttcaagaaaaagctggctgcacaaaggccaacgatagttaaaccgcaaacagcaacccagattaatttcatggcaactgatgatattgaagtgcccattgatgatagggtaaagataccgttaaatgatttgaaattcggtgaatcacgatacataaagcgagcacccacggttgctcctaaaccagttgaagtagctgcggcaacgcccatccagaaggatgataacgatgaacaagagccattggaagttaatgatgataatcaaaaaattgaacctgttatccgtttctcgaaggagttatctgataaaagtaacttcacagatgttatcatccgacgaacagtgttaaatgagatcacaaagtgttatatctccggttacacgcaggttgatgcttttggtgattgcttcgctgcctcttacctgtcaatgatgccacaaaaaagacatgcaattgtgtcaactaacatgggactggaatacatgtcacttgaagatattgtgactttatgttacagagcccatctcaacgtttgtctaatcaccaagcgacccataatcatcacaggcgaccctactactattagttacgtgaacatccttgacgtgaaactagtgaatggtaagagccattggaacccttgtatgatcacggacttacagtacgacgatgataaaattatacggccaatggacttatccattgaccacatcactaatacttatgcaggtcaaccagaattcatcaattttctaaaacgttatgccattaagtatgagtccgacgtactgaccttacatataccagctggcaaagagatatcgggcaaatacaagattcacaatgataggaaaccaaccaagagcctgtacgctgacttgaacgactacaagtacttacaaagtacgactcaaccgcgttgccatatcggacaccactttataaacaatttgcctaaccctgtcactatcagaatgcatattagtagtgatccaattagtgtcaactcattggcaaccaactccacgaaagactggagcactggtgacatcaaaattgatatcaataaaatatttgaagataaaacaaacttggatatccaggatgacggcttaagacattcttatgatttaaacgtgaagggcgagttgattgagacagtacgctatacagaattggctgacttttatgaaatgattaacttgtgctcttggaggaagtgtgatctaatcactaccacccctatgggagagccgcaatgtagttattatgaactatacctgctcaacccctctagcctacatagcacagcctaccagatacttaagaataggaattctaaactggtttatctaacaaagacgcgtatcaacaataactcaatgtacataacagatattgaagaatcacttacgcacgctaggtggcccattacggtgagtggtaagtgtgatacctgtttgaatatacgtataccaaccaaaacacagtgcttcaaatgcttatatcctaagtacgtggcttcggttaacttcaatcaaccatgcgtactagtaaaacacagtttactgaataatgactattcaaacgttagaagctgtgccatgtcctaccatctcaatatcttaatcaagatatttaatgacttacatgatgcagtggctgctactgactatgggaagaagtcatttagcaatggatgtttcattattaaaagtgtagaacaagttagggccatacgacataacctaactaatgacatatgcatcgtacttaatgaaaaggctgaatgggcttatggtgaccataaatttattgaaagttgtgtcagaaacaatagtattgttattcggcataagaatgctactaattatcactttaagagtatgagtgaacttaacaatatggaaaatataccagccttcccgcaagtccaactgatagatggacccccaggtagtgggaaaaccacgaaattaaccaatatggttgatgaaattataacaaaacaaagcatcatgttgaaccgcgataagtttacgacgaagcccaccaaagaaagaatcggcttagacgaagctggattattcaacgtgtttgacatactacaattggcaattaagggtgtgaaagaaataatagcaacttacgatagcaatcaaatgggcacaccagacctaattggatacgaccaaggtggctcaacccaatggcttaataaagcctcgaccatagaaacgctaaacgtgtcgtataggtttgggcctgagacagcaaagatattgtcaaggtttggaatgcccatgtctggactaaatattaatgataagggtataaaatttattaaaactgtgggtagcatcagtaaggcgttgaccacgttagaaggaaggcaagtaaatgccatactaactgttagtaataaaactaaatcttacgtcgcacgattcaccaatgacgttcaagtggtcaacatcgataaatcgcaaggttctgaatgggaccatgtagtgttattactattagataatgatgcactaactgataaagccttatatactgccttatccagacatcggatttcgtgtacggtgttagccaataacaacgacttaaaattacctaatggcttgtcaatgacaggcataaatgaaattggcattaatattagtagttttgtggtatcaggttgtagattgatgttggaggagatacttatccctacagtcgaattagttaaatgtgtaggtagatatctaccacaattagcaaaatatgtggtagattatctgcgctttcaagccgtaaggatgaatgtgcttagtttctcggatacagctaccatactatggcaaatggaacacgattcaaacccatctcggtttgtcaccaacattaaaaaatatgagggatcaaccaattatgaaaagttatttaacttcatgctagattctaacatattgatatatggttttgatgatatgagtaattacaaaatgaaacgcttggtcgacgaattcttaacgtcgttgagaggctacaataattcacgcaagtttaatatggtaaaagctattagcgtgaaaaacctactaagggctaacgggaaaataacaatggaagaaatatcggaaatattaaaccaggatttacggcaagactatgctacagttgacaaaatacttgacgatatgaacataactaaagtggctgctgagaatgggcgtgaggattatgaaatacgtagtagcgccttattgcacttatggatgatggacgaagctaaatggactaatattagatataaacttggccgcaacgcagctaccgggtgccttgatttagatgctatggaacgtagacataaargcttacttagccgtatgaattataaaactatgcgcaacttaacggaggccatgatagttaatggtgattacaaggaagtatatgacgtattagctaggaatggaattagcatcaacctactatatgataacaaggttatcagcagtacgcttgatatcatgaagaccatgactgattttagtaaatatttgtacaccctatcgatcaagtggtttaaaaaactgtacaaccgctttataggagcaaaccacgctgaagatgatatagaaggaggtgtgaagttgccaatcagtccggataacctatttgacgcaacaaatgataaaaaggaagacatgaaagaacccgattatgagggcaaaggctacggcgactatgtggaagagtataatgtgtcacatgacataaacgaagaatacattgagtgctcacatgcgtccaaacgcatggtatcaaacttacctagtacagctaacaaggacattagaactaaagtcaaccaggatgagatgctactcacaaaaccgttcagagtattaggcaagaacttgaactgcggatgcattgaattgaaggtttcaaacttcacattatatgtaacaataggcaacactgtacacagtgatggttccggctttattttcaacaacatgatgaaagtagctcgaaagatgctggatacctggatgaacaatggtaatgttatgatggagaaattaactctatatataaaagacataatgattggattgttgaaatgttattattgcaatagtggcaataaattcttacacaaagtggttttaccaatatttggtgattcggctagtcaaattgtccaatcgcacccgcagctaagaagattagccaggatgcataagaggatagttggaatgagaaattactatataaacgtaccgtggttccaagacaggtcccacgtatttataactgtgaacaagaactcaacaacaataatgattacatcctctgggatcaatgtaaatcacttaggtttgagggatatccttaaagagcatgacacgccagcacttactggtttacaacaattagtatttgaaacaatgggagttaagttagctgaaggggatgccaaatatcacaaacacctatttgaaatacatccattgctaaattatgagggcccaggccgttcaagttttgatacagtggacatgatgttggaagacgccacacgccaaataatgacaagtaatttgttaaactatgataagaaatttaaatcccaagtaagggccatatgcatacctagtggttcagggaaaactacattcatcaagcgtaataaagaactaaacataaccgatgtagacgatttaataccagttgattctttcctcaaaattaaagatctaaatttgaagaaaggttggcgattagttgaagacgtatacgttactagaattagaatgtgggatgaacaacggagcagccccatgattttgtgtcaccacccagaccaagtaaaacatataacgagtgacatatcaatcatcataccggaatatactatttataaaccttggcatgagaatgacatggccgaattaattgaggcaagcagatactatcctacagtgagggttaaaaaccacatcgaattacacgatcaaattattagtatgtttaactataatttagctcccaaattacgtgatgatgacgtattagacattgactacactgattccattgaattttatcaaaataaccatatagacgatcatattaaatacgtcttacctaacaaaggcattattagtagtagagaacaattacatgggaagaaagttttaacaaactacactaacagatatctaccaccagtcactaggccttccacaggcaaaatttacaatgatctattcaatgcaattacgactaggttatatggagtggaacctctacaagagttggtgcctgattacgacgaaacattaagtaacttatcaaagtttttcgtgccaaattataaggaactcatggcaaaatacaaaaatgcacctatcacggttgaccacacacacatgatgcgttgggtagaaaagaaaggtaaccagtataataatatcttagtactcaaaaggcatttagaacagctccaacaaggattcaacatgcaacaagctagagtccattataaagttgaactgttgctcaaagaaaaaatcaagtcatacaatcaacaaattggtagagttatcgtatggcatgagcaacatattagcatgtatttatgcccaataatcgatgaagtaaaagccagaatgaagagcctattaagggaaggtatactatatacggatggtaaagacttgttcaacctgaacaaaagtgctactatcgtaccatatgacgtcaattacaaggtattagaacttgacttaagcaagcaagatcgacaaacaagtaaagagatattaagtaagcatttcacatttatgcaggctttaggcttaacagatggtcataatgccctatatcaggaattactactgacatggagctttaattcaagaacgaagatacgtggcaacttaccacccatgcatatgagcgggggtacattcaccggtcttggcaatgaactgcgtaatctttatatactatcagatatcaatgcaatgtatcctattgattacagttggtcattaggcgatgatagcataagtttaactaaatcggaaatggatgaagaagtattgagagacatggcagccaagagacacaacgtacgtctaaccattagtttaggaaaaaccggcaaattctgtcaattaatatttggcaaaattcctggagtgggttggaggttttcaccttcgattatacgtctatttgataaattgtgcactggagttggcgattacatggccaacttaagagaaagagcatatagctacttacaactaatagggcaccataggtatgtaattagtacaattaaacacctaaattatgattacttacctatacaaggcactaccatagaagaacgtatatatctaaactgcaattattacaagctaggagacaacactatagaggcatacattaaaactatatgcctaatgtgctatgatccccagcttgaagaacataagttttatgtcaactattaa

SEQ ID NO: 1185 - DNA, 12063 bp, Sclerotinia minor betaendornavirus 1
  source 1..12063: mol_type = other DNA
atgggtttccctaagcaatacaccactgagccctggtatgtcaagatgttgtccactttccggtctagtgacactaatgctgaccactacaagtctttacacggagtatcccccgctacccaaacagtcatgccatggaagaaaactgacgtgccgaagccaattgaagatgtcttggacaacagtaagactcctgatacacccacccttggcacagcacgaaagtcatgtctatggtcagcaatgaatactcttaatcccaggggtatggagcagatacctatcaatataagtaacttgaagtatttggactaccaaaaatacaaagtatggcgggcaggtgtaacaaaaggttggttagccattgagataagacgtgaccactccaaaaaccacttacactgtctttctggaaaccacaaagagcagttgttatcaggcgatggtaaacttactggtgtcatacattggacaaagatgtttactgaaataaacaatgagtcacagttgtcatggggccaactcaattggagcaacccagatgcgggccgcattaacttttatggtgctaaagcaacggtattggaaaaattagcacacgatctcaatgtgccattgagcatgcttgacagtggtgctgtaagagcacaacttgcatcaacgattgcttcaatgtcagatatagcagtaaaaccacgtgatacacgggttgagcaattgcccaatgacacaagtgatcttgttattgaccagttaagtcgtgactatggtaatttcaaattcatacgcggctccagtggtagtcacccacatccatatcacaatgccgctcggcatgtcatcacaagatatattgtatcgcttttcccaaaatctgatttactgtatgatattggtggcaacatgttgtaccatgtacagaatggcgattggcatgtacactcggtgttcaaagctgaatcgtatgaagacaagtcgcgatatttaacctacacgacagcagtagtgaaacacatcagtgtaagaaaatcgcaaactaacatcactggagccaccaattctatcacacagagtatgttatctaaagttctgacagcagataacaagttatggtgtaacagttcatggggggattgtcaacacggcactaagaatcatgcaacctttgctatgtctgttgacacgctgtttaacatcgagccatccgagttgttaaaagggtatattgcgcataaggtaatcatggcaaaacatgccttgaccgtacccaaagcatggcacatggccgattctggcactttaatgtttgatgaaggctattggtctaaatctgatggcaatcttaatgtggtgtttcctggggagtcaatgacctaccaaaacagcataagtttgattgatacctacataaaacgcccattaatcatgggtgacagccatgctatttattgcagagtaaacggatacaaagggccccacctaatgatagaccattttgtgttgcctcgcagcctcgttatagagcaatttatgaaacatacgatctggtcaaacccggatacaaatacgattgtggtcgtagtaccagtgatcgatatacacgccccagttactctattaaagcaacaaccattcacgatggaagcaatggtattaaatatacctttttatgagaagttgatgaatcggttactgcaaccacacacgtgggagggattaactcagtatgcagccggtctcgtaggcaggacctatggctctgctagtggttttacgcgccaatttgacataactaacagagacgtgaaaaatcattgcttggttgcttattggtcgaacaaccgttcccttgagtctattcgccctctagttaggcgagctgagattgatgtccaccaaccatcttttctgcaacagctttggtcttcacttaaaacattcttaactgaattgggccgccagtttgaccccactgagtctgacttcattaaaaaactcgttagtgacaattcagaagactccatgcacttagggctactacttgacagtgcattcaaggccattgatagtgttaacgccagcaccagattagatgtatcgcattacataactaacggcatgatgtatgagacaggagttactgcaacaacaaaatgcgtagatattgacacgtggagacaaaatcatgtcgaggtatcacatagtactgtctacactttaataacaggtaaagatgatatcactcatgttaccattgagttgtgcaaggctgcagttgagtgccaacacaaccacaaagtagcccatgaacatgtagtgggtaattcaatagaccaacgagtgggcatctgtaattgttgtaaaatacttagcacgctgaccgaccaaaatctgtgtgcgctatgtggaagcaccaggttgtgccatggtaagagccatctctgtaaacatgaacataccgttgtgaatgatgaatgttgtggtaagccagcatgtacgtgcaagaaaaattataaatgttcatgttgccagatgcctagtccattaccagtttgtgagatgtgtcgcaacgccccgcctcctaaaaccgcagtgtgggatgcaggtacgatacggcaacctagttctcaggccgatactggtcgccccgaacccacatctacgacaggcgacaacagaacaggcgatgcaaatgataataatgacaaacccagtggcgatgatgcaaatgatgatgggccatttggaatgttaagtgatgcttcacgacgcgcaagtattgtaggcgctgaagatactaatttcacacaacacatgtcatttggtgaccacccgtctactataccaatcaataccaatattgtagaccgtgcccaagccttacaaggaactgactcgccaatagactatgaagactttgtcgctgaaggttcagatcactctgttgttagtttccaaataccagatgacacatctaccatcaatgacagggtcagtgctgaaagacaattggatgaactacgcaaactggtgcccattaacaacgaaccagtcaatgagtatgggtttgcaggcttagaagcattaagtactgtgtacaacgccattcgctttaccgagaatgcggctaccaagtcagttactaaactaacattgccaccaaacttggttgctaggcagacaacggtcagtgctgtcgttattgcgtatggcgaagctcgcggtgatggcctgtgtggtgcacatgctttaagccaattgtgtgatagtgatatagacacagtaaccactatactaaagcgtgtaactggtaaccatgattggtggtcagatgtcgaacttgccaaagccgctgcagtactacgtattaatattctgcttgctacgccagctgggtctattttgtacatcaatgactctagccaacgtcattatgtcagcatttgtaccttggttggcttgacaggacaacgacattgggtaccgtgttccagcatggttgaccaactttacactagtgacctacgtaaccaatattataattatatattcctagcgacttatgcgagcatgagtcaagacacatctaaaagtatagaagatgtacgttcggcagttgaccgattcgaaccaataaatgttgactctgctagtatcatatcttaccacgttgactatgagtggtcaaacataattgccaactaccctaatggtgtgttcactacccttggttatgaacatacatctaagagcttttatggccaaccaatatcaaactatgtagctgagggtgaaaatgggctgttaatggtatctgctccaaccgggtttggtaagacaacgcgcattgctgagtttaatgaccaaaagaagaatcatgtagtgatatcaccgagtcgtgccacggtaattagtgcaactacgtattgtaacgacgtacttaacataacgtcccagggccgcgcagactcaacttggcatccaaaaggtaaaagtgattcaacccttagcacggcaaaagtagtttacctaacagtagattcagcttacatggcattgtgtaacggtaaacctaacgcgacttggttaaaaatgctgtctggtaggtgtatatggcttgatgaagtccatgatttgactccaaagtatgttagtttagctaaggtgttgggctcacttgtaacaggcgtgctgtctgccactttacctaatttaccacctgttactgatacattacacccaatacgtacaatatttgcggctcctgatcaactagacagtgactttaatgattttatagagcgtggtcccgaaaaaggttcattctgggtggtccctagctctactcagacagccaatatgccagcagagcgtgtcacgcaagctaccaataatggagttaaatttgcgagcataacttcaaagactttagctagtctcgacctcactaatgtgaactcggctatatgtactaattgcattactactgggtcaactttaccaggcttagaaaacatgcatgacttgggctatcgaataaccccagagttgatatacccgccatataaggctgaggttaagggtgttaacaagatgagatttttcaactacaagcggcatcaatatgacatgacacagttaacgcagtcacgagggcgtgcaggacgaacaagtacggggtacgcagctatgtctctacccgctgcagccaatgcaccagctgtgcatgtggaactattatatagcttgatggttggcatcccagcaaatacgcggtgcaaagacttatatgataatttaaaaacaaacaaggttaactttgatgccattaaacgagaacgtgacattgcaacgcaacgtggttatgatttccaaaatgagcaatgggatgtgctagatgcatggattgagactgtaagcgaactatatttgcatctcaaaaacaagatagcgagcaccgacgcagtcttggacaacaacacaatatcagcagcctttatgtctgctcttaatacagacagcaaattgcacatcgacaaatccatcaaacggcgtatacaaaccaatatgcataataaatcaattcactatcctaaattacacaagtgtgactgcgggttactaacaatccttggaaaacatggatgcggtaaccagctcgtgttacccaaaccagaggcggaatggttcaacatgactattgagcaatcttactctgacggtagtttcagccaccctaaatcaattttggcaatcgacacgtcatcttctgcacgtggcattaatttgtcaacaaagctgtcacagcaatttgtgtcaatatactttaaaatgctcaacactatactccacgcagctaaacatgctacaaccagtaacataccaacaagtataacccacggtgttttgtttgaaagcgtcaatagtaacaagcacgttaatgtctctgagttgaaacacccccataaactcaacagtggttcagtactgggagtttttgatagtaatatgagagtattacgccttgagtgcgttgtgggtgctacaattgattgttcagtaacatcgccgcaagcaatagtgattctacctgtgcatacagcaaactacgcgttaggcatggggctagctagtctagcgcgcaacataacactcaatgatgccatcgcagttgccacacgctccactattattgttgggccacctggttccggcaaaactcgtgaattacacaggctgtttgataatgaccagcagacaaaacgaatagtttctaaacagactgaccaaatttcggaatttaagaatattactgttccacccacggctgctatattctctgacaatgtagaaactatatatgtagatgaattcggtctaatgactgcatctgatatattgctattgtctaccaagtgtaacaagatggttatgtcaggtgacgtcaaccaaaaaattgcagatgacaccgatttggacacatcaactacactcgatctctcatggtttagggacaacgtgggttcttctacagttttcaatgagtcatggcgctttgggaccaagactgcgtcggtgctgagttattttggcacactaggcccgtgccataatgcaaacgataaaggcattggtatggtacagtttaactggctcaccaagaaaaacttaaatacaatactcattgaccatgacattcaattgatcataacccattctaatgctttagcaatgcagatcaaattaatattaggcacaaacagcaacattagttgcacgacgacgggtcgagctcaaggcagtcaggagaaacgtgtattatatgtggcttatggtaataccagtgaaacttacaccgctgccgcagatttgccagccctatcacgacatagcgaacactgtgttatagcagctgactacacgtttgaggccacagcaaagacatacgggttcaataaacatatgcaaaatgtagactcaatgagatacggggctaccacgatgcccaaagtcagtgacatgagcgtggactatgttatggaagcctggtcaaacatacgcttgaactaccacaaatttgctgaacctagatataacaaagcatttgataattacctgaaataccacaaagcattgtcacactgcattgattacctaactaatgacgtgtctggcactaatggtttagatatcagcatatctgcttgcgtgatatataacaagttgtaccgtggtgttgatgatgctgaatttacgcggccactaacgccacaacacctagaagtctacaatagtatgacgaacatactcaacacatttggccccggagtcacagtgtcagttgagcgaactgccgaagttatgagcgagtacttacggcccatagttagtgtgcgtcaatactttatcctgccattttcaactaacgtaaaactgattggtaatgccaacaaatttacatcgtatgccttgtgtaacgtgctctctggtaaaatcataatgacacaaaccaataacctaacctttcagcgacctactgttaattcattgcgtgccttcattgaatcaatgaaggacaatgttgactgggacaaggacatgtgtgcacgaatgtccataagtaaattgctatttgagcgcctaaagaaaagtgtcactatatcataccaagagatgttaaatacatctgagtctatatataattacaccatcaataaagtgccaactttatactcgctgtcacacaacaaagcacccaacttgcctaaatcccaaacactatttgagcgtattatcgatagcctacttatcgatacaccatcacctaatcaaactattaccaaggtctacttggatgccgtcaaccaactagtagagggtgacacgcccaaggggtctagcttaggctacgccacattatctgaagagctcatgtacgatgctcttgtgagcacattacgcgggttctatgagcataacaatgtggatttgttcatttcgcaagtgtgtgacattacgtctacgtgttttgacgctaaagaaactgcgggtgacacgcacttgctcactttaccgataaaacgcttacaccaaacggttgaacacattcataaacacatccataacgtagtaatagtagatgtaaagaggagaaaaataatagcaactgtggatatacgacccagtactgaacattattggcatatcagcgacttgtataagagaactcatgcactcctactgctgggattggtagatgatcagattaacacatacaataactatgcgttatgtaatattatctcaaatgttaaggaaaccgccacaaaagcaattacagcccaagagcaatttttctcgaagttgctgaagtatatacagaatatcataagctcgctccgtataaaggttcttgaaggaaaagaaatacttaaattatgtggcatagagcaaatgtatgctacacgtatgaagcaatcaaacggaacagcacaaaatacagcagaaacacaaaatgacgtacattcactatcaactagcactttgaaacataaagctgtcaaaggcttgcagcttatggtattgggtcatatcgctaatcattatgacattgatatcaataagcagctacaaagaactgtcgcttcagctgtgagaatggcacacgacgatcgggcgggtgatgacctttcaacatcaccattattacgtttatattacagcttaaaactttatgctcagggttatgaaacaggcgctgccaacattatgggatatgatgtgtttaatatctgcaacgttaaggtgactattaatgaatcgttaccagtgactttgctgcgtcgtcttaatgatagcgcgcgtgatagtttaatgagtgaaaccagccgtaaacacgttgttagtcccaaacacactagagtaagtagttcgaataagtgggacggccaaagtgtaggtttatccatcaaacgcatattcgccacaagtgagagcaatccagccgacgacacaccatttgatgacctgttatatgaactgaaatctacactgtcagacgacatatcagttacaacttcagagaatgctaacaggcatggtatgatgaagctcaactcactcaagatggtacttgcgatgtatcctaacataaccaccacaatgctagtgattacgaaagcctattatgagttgtataaccatgtgttctcaccagtattgggtgcattacagaacacaatatgtaagagtgtaatcaaggtaaaaaatagtattgtgcggtttctggaatatgatgccaatcttgccgatgccaagttggaaatacaagatttacgtgactcattagatagtgcgcgtgaaagccccgcacttacgccacttgatccartaccaattaaagatgatagtagcggtgctgagtcgtcaatgtatgaagatgctgctgaaggtatatgcaacaaaatggagccagcaagcactgataaaatccatgaaaactcggtattagcggagtatgtaaaacaacaacttatgtctggtaatggttcgataagcgagtcactgttcaccacatgtggaagtgatgtgaaaactaaaatggtgtacagtcagagagagaaattcaagtcaagcatgtttgttaagtgggatcataaagcaagctattcgacagttcatgccaggccactaccaaaaataaccatgggcacaatagatagcgttatctacatggtagtcgataaagttgccttgaagctagtacccacatatgagggttacaagatttggtggaacgatgctaacgcattgagaaatgagaacaaactgtgcattggtctaaacctgttgacacgcatagctggtgataaggcaagtgacatgattttagcattgatcactaaaatgtttactgatgttattaactggtgcaagcttaccaaagatgagttggtgtggaaaacaaagtatttggccaacggcgtgtgccgatcaaagtacaactattcattctcaacgatgtcattataccatatcctacaagacagtaaaccgttcaggcgactcatgtgccatgatacaaggtcaaggtttacaatggttggtgacacgatacacattactaggaggactgaagcactagtgcttgactgtcacacctatgctgtagcaagaaatactgcgactggttgttgtctaactatttatagtgccctgcagagtcgcattgacataatggtacgcgcaattgaagcaaatatggtagcaggtttgtgtgactacacagatagggctggcaaatctgggctagacggcttgaggaagctgggtatcaatatagactctagcacattgagtgatatagactttgtgaaatggaaaagcattttacgggatgcgttggaaaataaccctcttagtgcaatatttgatatgagcttagatgatacttttacatctttcaaacaactgatggaaagtgagaaagcaatgctcgacattgagaacaggatagacaacaccatcagcttactaaaatcaagagttgccatatgtatgccaagtgggcacggcaaaacaaccctcaaaggcacactactaaggaaatacccttcgatagatgtgtatgatgctgatgactacattactgatattgacgcgctaggatggtctaattttgaccgtatgatggcgcagtacagkttgcgtctaactgaagcagtcgagtgttctagtaacaataagcccaagttgatactgtgtcatcaccccgatgccgtaccagatgggtttagcatagtactgttcatgaatagtgaaacgccgtacacaccggaacgcttgtggaaacaaaccaatgaggctcgtttgttggcaatgcaggacaaatatccgctgtatactgtaacattttcagatatggaacaccaaactatcttgttcatgctccgatcaggtgccacgccgagtatcaagttgcatgcaaagagtgagctggttgatcctatgccatatagtgaagcagagcaattctttcaatcgcctggaccagataacttgtggcacatgccaattcaaggaaggttaggggtcaatgaccacaggctaggcactgcacaacaggtgatttacaagcaaggaccacatgtaggcttgtgtagaccgacagtgcaaatgctgtgctctagtactttcaatgcggtgtcttcacgcttacgtggcattgaacacctacgtaaggtaaatttcagccgagaagaatacatgacgaaaatgagctattggttcaaaccgaattggcgtgatatactacacgactaccaaaatgaggtagtaatgcctagtgtttctgcttcacttgagtgggctattaataagggacataaagttgaactcatacgtgatatggctgaagctgtcttgaactatgagcgagctactgagtacacaaatatacaagcacattttaaagtggagaatcttatgaaagagaatgtagatgagcttgagcaccagcttgggcggatcattgtttggaataaccaaaatgtgaatatgatcttatgcccaatagtcaatgaatgtaaagctcggtttaagaatttatttaatgacaatttgctaacatataccgatggtatggatatggtatcgttaaataaacacctcagcaagaattcacgctcaaagtatatgattgaactagatctcagcaaacaggataggcaaactgacaaacaaataattgattttgaacagtggttgttaactgaattaggacttgatggacgagttgtacattacatgaatggtatattaaatgggtttagcctcaaaacaccagacaatgttaccggttttatgcctacgatgcacctgtctggtggtgcaatgacatctttggggaacgagatgcgtaatttgttactgttatctgacatatgcaaaggtaaagcagtaaaccatgtgtatacactgggtgatgatagcttgatacttacggatgacgattttgatggtaagtatgtggcaattgtagcagctaataaccacaatgtcaaatgtactttcacaacgtctgaacactcaggtgtctttttgcaattgatagtgatgtgggtaaatggtagatacatagctgtacataactttgtaagactgagggataagttagcatattcaccatataacgctgatagtgatgaatttaaatccaagacagcatcttatctattaatgataggcaaccattatttgacaagtaaacgtctcctagagttaggatttaatggcacaataccgttggggacgacaatggaagacaggttagaagcaaatgcgctacataataactgtgatgtggctgacgtactgaacattgtgcacgatatagtagtaatctcatacggtaaacacgaaagcaagctaacaattactggtgtgggtgtactaagttaccgacacctcaaaggcggtatacacatgacaaaaggaagacagagtgatacctcattgttagcatcatttcagtcggcagtgcaaaaagaattggacaacaactaa

SEQ ID NO: 1186 - DNA, 10380 bp, Sclerotinia sclerotiorum betaendornavirus 1
  source 1..10380: mol_type = other DNA
atgtctcaaacaatcacaaacacaactattactactacaacaataaccgatgcacaaataaatacacataagagggcttttgggtccctctctaaagattacccaaacaaaaaccatcagcgtggtttaacttggtttgatgttgttgatccacctaagcaacagaaacattggcccaaacttacgcctaatccgcgatggaagaagctatcaacgtcaaaaaatgctgttggtaaagctgaacttggtggtgaaacccaagttatggctagttacaattgttggcagtgcatttttggctatgatttaggtattgatactgctatctcattagaaatgattaagatgacgattatgtgtcagcccgaagatgctgcacatatccagatccaagctagttatgctaatggcatgttacacatagcaaatccacctggtttaccaaccggggagatgacacctgaattgttcaacgcccagagaaaatttgtcgagcatccaattgatgggtgcattaaattaattgacttagttgatttatatgatgagggtaccatggttggtttcaccccacgaactatcacagagaaattagctaatgacattggtgttgacgttaattcagtagatacacaacaacttaaaaaagctatctctgattcagttaatagccgtggtactaaggctgttaccaaattcacagaccaggcaattattttaccgacaagttgcccagaagaaattgttaatgaccttaataatgaatttggtaatgcaacattcatacgtggtaataaagagcaccatccacatatttatcacaatgctagtaggaaagctgttacaaatttactatgtggttggcatggtagagatgcgctcatatatgatattggcggaaacccagctagccacctaaatgctggccggtttaccgtgcatagtgtttatagtaaaaatcaagctgctgacaatgcgcgacatattaaatggtcaaaacaatgtgtggcatgggctcgtcgcaacatgaacaatgaaaacaatcattctgtcgtcaatggtgtggcaaattcaatacttaaacctaacagtgcattatggtgctcagatggaataaacaagtgtgtgcattctagtaagcatggttcttttggcatttcaattgacactttattccatttacctgttaatgacttgtttgatttctatataagaaacaaggtatttcattcagtacatgctattactttgccaaccaattactcatatgctagaaatggtgcattgaaatacaatgaaggccattggtataagaagaacgatgattggacaattgagttcaatggcgagagtttagcatatagtcaaagtgttgccctcacagatacgtatttgactgtgcccttacacaatattggtgaaatggttgtttattgtaaagtatcaggctacaaaggtgctcacttaattattgaacattatttgattgatcgcgcacaacttgatcaattatatcttaagcatgtaatgtggttcaacaccaacatggatgaactatttgttatggtgccacgtattaatatggaccagtcaactactgtcatgggtaggattccatatactatggaacaagttgttatcaatgttagattctatgagcgtcttctaaataggttaatgcaatcatacacttgggatagtgtcttgtcatatgctgctggcttaataggccgtgtttatgctacttcaagtggtctacatatgaaatggaatctaactaattcacaggttcgtgatcattgtttaatcgcctactggactacaaaccgtatcaatgaatcgatcaaaccactgctagcacaagcagaacatgcatcacgagatccagattttttaactagtctatggaactcacttaaaaattggcttaaagacttcggatcacaattcgatcctactggaaacaatactgtccagaaattcattgctgataataaaggtgatactcttaggctaattcagatgtttaatagtactgtacgcagtgttgaatcgcttaacgtggcaacgcaaatggtacattcaaggagcgttgttgactgggttgcttcttcaactggtgtgagctacaggcgtcttgatgttgatattgacacctggcggttaaatcaagacatgagtggcaacaaaatgacggtatatgaccatattgaattcaaagatgcaaaaccagctggagttaacataggttgttccatcactaaaacatgtacccatgatcacaaaccattccatctacatctctcagacctcagcagacgtatgggcaattgtgcatgctgtggcgtggttagcaacttaaacataaccaaactatgtactatatgctccgatatattaccttgccatggtaaaaatctacggtgcactcacatccatgaacaattaaatgatgagtgttgcttattaacaaaatgtacttgtaaaaaagataagaattgctcttgttgtggactaccatctgtcggtacatattgtaaagtatgccaatttctgcctgacaaagcaacaaataaacagccaacaaattcagttaataacaacagcacaactgtcgcgcctattataatgaaacctacgactgaaagaaaagatgctcctgtacgattcacatttgaaaagccacaagttagtaacacacagaatgagtttaaaaagaatgaatcagccacccatccccttgccactaacaatgactctctatttgttacacttaaagagcagcttgttgatgatgttgttacttttgatgacaaaactaccattaaaagtgatgatgctgagatacgtagtgttgctaccgagtcgattgtatcagttgaggccagcgttgatgccatccaactcaatgataataatattgaaccattgttgcctgaagaagaggttgcaggcacagaacagattagtaccttaatgagggctgttgtcagcgttgatgatgttaacccaggacatgctgacacagtattaacaagactgccaccacggtatcaaggaggcgtggctgtccgtgttgttgggtatacagatgtgccaggcgatggcacatgtggtgctcacgcactaagcgtagcacttgggctcaacgttgatgaggtgaaacattggttaactgttgccactggccatgatgattggcataactctgaggagctggctgcttgtgccctagcatatggtcggaatctaatctgtgttgacattggtgacactaccatttacagaggtggtgaccaagattatgctggctctattattcatggtactgttgttggttgtggcgcacactggttagccgggaattgcaacatccttagttactcatcgctcttcacaaataagctaatcagtgattataccaatttattacgagcagctcatctcactctaaatggcagtgatcaaacagcccttgcttattcacatagtgatttagatgttgatagtattattgacatgaatggcagtatcatcattagccgggaaggtatctcagtgcaacatgagggtggtaactcaaagtgccaaatatcagataagtcagatgacattaaaatgattattggaccaactggctctggcaaaactaccacagctttccaacatattgaagggaaagtattattgatcacaccactccgatcagcagttaataatagtttcgattatttaaagaacaaagtaaaagtggtagcccgtgcgcaaggtgcttggatacctgacaatattaacataaaagatataaccaagtcagatctggtaataatgacaatggagacactatattctggtatatttattggacaagacaagaaaaacatctaccatcaacttgtttcagctcgtgcaattatttgtgatgaagttcatgaaataagcccacactatgccaggctattaactgtactaccaaagaacaagacatacatctgctcagctactatgcctggtatcaagcttgattataattgtaagtttgatgtaacaacgaactttgttcaaggagacatcgttgattactggtttaatgaagtcaagacaagtagaacaatgccacttaatacatgttatatagttggaacaaagaatgagtgcaagtttgctgatatgccaaatgacatcaaagctattaattcatctactatcaatgaggtaaccattaatgaagtcaatagatgtattgcaacaaacatagtgacaacaagcattaccatgccacaaattgcaaacataatagatttaggagttagaattacaagcgatgtgattgttaaaccatatctaactgatgttgaaaaagacattaggttcttcaattatagtaaacgcctatacagttgggctgaaatgacacaggctaggggtagagttggccgtgtttctgatggacaattttatggaccatgccctgataagacaactcgacaatcaaatattgaagcaatgttaaatagttgttacacgcgtgctccatgctatagtggcttactacatgagtggcaaatgattacacaaaaaaactatgatgaagcagtcaatcatttcacaaagcttggtaacacatttgatagtaaacctaaatggtgggatgagttccagtcatggcaggaatcagttgcagaattattacaatgcaaaaatgctaacctacaacctgtgtttgttgatgaatacatacacaaagaagatattttagcactaataccaaattacattggcactaatccaatatcaacaagtatgaaacataacaagaatagagttggtgcattacgttatagttgtgcagttgattgggataatgtcttacctaagcacttgtatgaaacaactgacaatattgattttgaaagcttagtgatatctgttcccgatagctctcaatttctcaatattgaaactgattctaatgaagagatagcatctaaactacggctgttagctatagctagtatattaaatgcaatcaaaggcttaatggcgcgagggcaaatctatattaacactaataaatggagtgatcaacatggtcaatatatattatatgatagtttagaagatgcccaagcattatcaggtattaacttatcagagtatgacattattggtttagttgatattaagaaatctagcatgcgtatcacacattatcagcaatcaaacaaatgggtaggttatgttatagtaccaacttacaaaacacaccactatatgggccaattaactgacattggtttaattcgtgatcgtcaagcaccactagttgacacactacgtaattctacattgtatgtgggaccaccaggtagtggtaaaacgacgatgatggttaacgaaaacaaatcgtcgtatactacaactattagttcagggcaattaaaaaaccatggaacatggttgcccccatcattgataccacatagtcaagaaaacatcaatattgatgagattggattgctagatgtttcagtcatattatcactcgctagccggtctaataaattaacaggcacaggtgatatcagtcaagttgtgcatattgccaatgaaaccaatgcctattacactggatttgatagtggcattgatttattttcaaaatatgctaacaaaatttatttagataagactcaccgttttggtccactaacatgcaatttggttgctaaactaggttttgatattaaccccaccaatatagataaaattgaagaaattaaaggttatgtttgcgcaacgaatgacaataaatcatatagtaaagtactaattgcttctgagcctgatgcaataatctgtgctactaatcacctagcaagaatgtttagaaaaattactcaaattcctgtgtataatatcgctaaatgtcaaggcattgacacaccaaatacattagttgtactacaaggcgggcagatagacgtgctagccaataatcaactgtatgtggcgttgactagacatagccaaagattatcaataatagttgatccaccacatgcagcattactaactcagttatgcattgaaactgaaaatatgatatcttacgctgatgctcttggtggatcaagtaatatcactcaaccaattttcaactacatcatcgagtccaatatgaatagattgcttaatgatgctcaagtgatgaactatctaacaacgatctgtgctctgcaatcagggaaaatttcaccgaatacaatgattgtaattatggaccagatgaattcgcactataataactgcccattcaagtttgttagactccgagagatcaaagatattaaacaattggagtgcgtcgtcagtttgtatggtatacagtgtatagtatacaatatctcaataactgatgaacgagaactactttgttgcctattgacacaagtaacaacaaacaaacacattaaagagtatttaagaagtctaccaaataggtttgcggcaactggaaaaaaactttgctataacttatacctctggcttagtaaatttatgaaagataatgcttctgtgctgagtacttatctttatgctaatgatactatagacattggaggtggtgtagatttatgtcatgtattgtggttggcaatcaatggtgttcggagtgcgtttatgactttaatacatttattggatgatgttggcaataaattatctaaatatactgatgggagttacgcagccgaacaatttaaagagttattaatcgatacttggaagaaaagtaacccattgagctttggtgatcttaaaattagcagtagtgttatctcactgtttaaaatattccgcgaccactttggtagtggcatcaaaactctgtgggatttcatccagtatgttgttaaaaacatgcgcgaatggtgggaaaatcaatttaacaatgacaaaccaatatactatgaactcgaaggtaccagcatgtcgttgatagttactgattcaccatgcattgatataatgagaaatagtttggacggcgactactcattgattgatggatctccaactatttcaaacacacaatatattacaaccttggataacttaattgacaattcaacaataggttgggagaaaaaggacgttccctcacccacatgtgaggactgtccagatgatatacaagaagttttggatgaaatcgaagtattatttgactatgaagctgagactaatgagaaatacgactcactaattgacaatgaacaccatgagtctactcatgagtgttctgaacccgaagttgagtctagtccgtgtgaacaaaaaaatgaaaaagaaaacatcaaacaaaatcaatgtttatgcatagaaacatgtaatgattggcaactagctgatacaatagttactagcttagacttaaatacttacaaaccaaatttgatgggtaggatggtaattgagaaaatatctgatgggattaagataaacttaaaactaccaggtgttgggaaattcaatgcggttacaaagaaatgctgtggggataacactcatctgatatatgtaaccgtcaatggtgagcagttaaccttaaagatcagcaagattgcatcaggttatgagctctactgcatgccagatgttgttgatgtaaacttttcacagcttgaacaagctattaaaatgttgagtaaattaggaggaggcaagcttaacaatggcatgactttactggttgattctctcaaaattaccagaaaatttattaaaaaattggttaggttgacacactataaattaaagtatctaatgggtacaatcaacttgcgtcatcttacaagtaacaggtcaaacttagaagtttaccgtacaatatgtcatagattaccaacttcatatggcaacagtaaatttagtacacgtgagtgtattggtggtactgttttatctaccattgaattgatacccaacaatgctgcaaaccgaagtgaaattttcattgctatttacaatgttaatggagatacacaaatactaatttttactaatgataataactattcaaattacattacgcgtcgtctgatgactccagttgaacatggtaattttgctggtgacaggtcagcaataagtgcattacttagactgggtattgatatcaaatccatactgacgcaggataatgatttgactatcgatgacattaagaagtggctattagcaaacccgctgacttctatgtttgatgttactgaccaacgaacatacaataatgcaaaagagcattcaattgttgagaaacatttatttactgatatccacaatatattagataagccattagatgttaaatatgctttttgtatacctagtggtcatggtaaaacgacaacagtaaatcggatacgaagaagtaaccaagaatttacggttttagatgttgatgaagtacaagaacaggcgacaatattacatttagggtttgaagataaaatgttaaattataaagagaagctggaaaaatacattgctaatagtacaaaaccaccagatgctgtgttcatacattcgcctatatgcgcacctgcaggttacaaagttataataattttaaatgatggtgctgatgtcccattggatagaatttggtccgataaaaatgtctgccaccttgaaagcatgaataatattatccatactcagaattatgatgatgtgtataatgtaacaataaactatttaaataaaaagttgaccggtgatatcactttagaagatggaacaacaattgttgataacatagatagtatacttggagactcgttcatgagaaatcatccagggtacgatgatatctataggttgccaactggaaaacaagatattctgaatatgaatactggaaatattggtttaggtgaacaaagatttttcaaaactggaccgcacccagaagtaatgcgtccaacagtgaataaaatgccatctgccttaccaaacgcaattatgacaaggctaatgggtcgcgtaaagtatagaactgttgacttaactatcaaagattaccataaattaatgactaaattcttcattaaaggttatgagtcaaagcttgctagttacacagatgacccaattaatttaaattatgaagacatactcaactggttagtggcgaaaggcaataaaatacaactattggacaacatgttgcgatctgttaaagacgatgagtttgctactgatccagctaatataaacgtgcattataaagttgagaatttaatgaaagagcaagtcaatgatatacttgatcaagtaggtagagtaattgtatggaataaccaaaatatcaatatgtatgcttgcccagttattaatgaggctaaagcacggtttaaatcattattgaaaccaaatgtcatttacaccgacggtatgacggtcgctgatatgaacaagagtataggccaatacaaaagtaaatggctgcttgagatggacctgtcaaaacaagataggcagacagatgcacagatcctgatttacgagtggaagctaatgggtatgttaggtgtgccagatgtattgatcgagtttatgacatcatttataccaacattccgaatcaatggcaccagccatgagacagcaaaactaccagccatacattttagtggtggtgcaatgaccagtatgggcaatgaaatacgtaatttattactgttatcagattgtattggtaataattacgttgcgatatatactttaggagatgatagtcttgtcttgatgaataccaagcctgatttggaattatacaagcgtatttgtgctagccggcacaatgtagagaatacagcggtggccagtacaaattgtgcattatttttgcagatgatagttgctcggaatgaagatgggacatactatttgagtcataattttgcacgtcttaaagaaaaattggtatattcaacatacccaaatactagctccgattggaaaatgaaatatgcatcatacttaatgatgataggatactcagcccaaaccaagagagcaatggagtacagtggattcgtgtctttccctagtttaggaacaacaatgtcacaaagagtctcagcaaatgctttgtacaatgagattaatgatctacaagtgttcaacataattaatgacataatcaatgctaaagagcaaatatcagaggagataattatacaattgccagtgataatgactggtagcaaacttaagtcaggtatgagtaaagttggcaaatacgtcgacaaccacaatacgatgcatgaactattgatacaatatatggaagagcacactgagacttag

SEQ ID NO: 1187 - DNA, 10476 bp, Sclerotinia sclerotiorum betaendornavirus 1
  source 1..10476: mol_type = other DNA
atgtctcaatcaattactcacacaactgttactactaaaacaataaccgatgcacaaacaaatacacataagagggcttttgggtccctcttaaaagattacccaaacaaaaatcatcaacgcggtacaacgtggtttgatgttgttgatccacctcaacaacaaaaatattggcccaaacttacgcctaaccctagatggaaaaaattatctacatcaaaagatgctgttggcaaagttgagcttggtggtgagacccaagttatggcaagttacaattgctggcaatgcatttttggttatgatttaggcattaacactgccatatctcttgaaatgattaaaatgaccataatgtgtcaaccagaagatgcagcacacattcaaatccaggctagttacgccaatggcatgctgcacattgcaaaccccccaggactgccgacaggggagatgacacctgaactattcgctgctcaaaggaaatttgttgaacacccaatagaaggatgtattaaattaattgaccttgttgatttatacgacgaaggtactatggtcggttttactcctcgtactattacggagaagttggctaatgatataggtgttgatgttagctctgttgatacacaacaactcaaaaaagcaatatccgattccgttaatagccgtggcacaagagctgtgactaaattcactgaccaggcaatcatattgccaacaagttgccctgaagagattgttaatgatctgaataatgagttcggaaatgcaacatttattcgtggcaacaaagaacatcacccacacatttaccacaatgccagtcgcaaagctgtcacaaacttattgtgtggttggcatggcagggacgctctaatatatgatattggtggcaacccagctagccatcttaacgcaggccggtttactgtacatagcgtttatagcaaaaatcaagctgcagacaatgcacgacatatcaaatggtcaaagcagtgtgtggcatgggcacgtcgcaatatgaacaacgatagcaaccattcagtggttaatggtgtagcaaattcaatattaatgccgaatagtgctctatggtgctcagatggaataaataagtgtgtccattctagcaaacatggctcttttggcatttctattgacaccttattccatttaccagtcaacgatctatttgacttttatatgagaaataagattttccatactgtgcatgcgataactttaccgaacaattactcatatgcaagaagtggtgcgcttaaatataatgaaggccattggtataaaaaaggtgatgattggacaattgaatttaatggagaaagtttagcatacagccaaagtattgccctcactgatacttatttatctgtgcctttacacaacattggtgagatggttgtttattgcaaggtgtcaggttacaagggtgctcatctaataatagaacactatttaattgatcgagcacaacttgatcaattgtatttaaagcatgttatgtggtttaatactaatatggatgaattatttgtaatggtgccacgtattaatatggatcaatcaaccacagtcatgggcagaattccatatactatggagcaagtagttattaacgttcgattctatgaacgtctattaaatagattgatgcagtcatacacttgggatagtgttttgtcctatgctgctggtcttataggtcgtgtttatgcaacatcaagtggtttacatatgaagtggaatttaaccaattcacaggtgcgtgatcattgcttgatcgcctactggactactaatcgtatcaatgaatcgatcaagccactgcttgcccaggcagaacgtgcatcccgagatcctgatttcttaactagcttgtggaattcactcaaaaactggctaaaagattttggctctcaatttgaccccactggcaacaccacagtccaaaaatttatagctgataataaaggtgacacccttaggcttattcaaatgttcaatagtaccgtacgtagtgttgaatcacttaatgtagcaacacagatggtacactcaagaagtgtcgtagactgggttgcatcctccactggagttagctacaggcgtctagatgttgacattgacacttggcgaatgaaacaagatatgagtggcaataaaatgacagtttatgatcatattgaatttaaagatgcaaagccagcaggggttaatattggttgtttaaccacaaagacatgcccacatgaccacaaaccattccatctacatttatctgatctcaatagacgtatgggcaactgtgcatgttgtggtgtgatcagtaatctgaacataacaaagctatgtaccatttgttccgatatactaccttgccacgggaaaaacctacgatgcacccacacccatgaacaattaaatgacgaatgttgttcattggctaagtgtacttgcagaaaggataaacattgttcatgctgtggtctaccatctgttaatatgtactgtaaagtatgccaatttttacctgacaaatcggtgaaaccacagccaaccacaacagttgatggcagtaacatcactatcgcacctgtcattgtaaaaccaacgaccgccaaaaaagaggcacctgtgcgtttcacattcgaaaaaccacaggctaccagcgcaaatgatgatgtgaaggacaacacaacaatcaatcatccactttctactaataatatttcccaatttgatgttttaaagcaacaggaagtggataaaattattacatatgatgatgaaaccactattaaagaagataatatggaaatacatagtgttgatgctgaatcagttggtacagtagataccaatattgatgctgaccgatctattaataacgatgttggaccattattacctgaagaagatgttgctggcattgatcaaatcaatacgctaatgagagcagttgttaatgttgaggatgtcaatccagggcatgctgatactgtactaacgaggctgccaccacattatcaaggaggtctggcagttcgcgttgttggatacaccgatgtgccgggcgatggcacatgtggtgcccacgccctaagtgttgctcttggattgaatgtagatgatgtaaaacattggttaaccattgcaactggccatgatgactggcataattctgaggagttagctgcctgtgctttagcatatggccgaaatataatttgtgttgatattggtgacaccactatatacagaggtggtgaccaagactatgctggttctatcatacatggcactgtcgtcggttgtggcgcacactggttggcaggaaattgtaatatccttagttactcttcactcttcactaataagttaataactgactacaccaatctactacgtgcagctcatcttgccttaaatggcaatgatcaaacagctcttgcatactcacacagtgactttgatgttgatagcatcatagatatgggtggtaacatcgtcattagccatgatggaatctctatacaacatgaaggtggcaattcaaggtgtcaaatatctgataagtcagatagtgtgaagatgattgttggaccaactggatcaggtaaaactacaaccgcattccaacacattgaaggtaaggtactattaattacaccactgcgttcagcagtaaataatagctttgattatctacgcaataaagtgaaagtggttgctcgagctcaaggcgcttggatgcctgataatattgacatgaaagatataaataaatcagacctagtaataatgactatggagacattatattcaggtatatttattggacatgacaagaagaatatttatcatcaattagtgtcagcacgtgccatcatatgtgatgaagttcatgagattagccctcactatgccagattattgactgttctaccaaaaaacaagacctacgtttgctcagccactatgcctggcatcaagctagattataactgtaaatttgatgtgacaacaaattttgtccagggtgatactattgattattggtttaatgaagttaaatctaatagagcaatgccacccaatacttgttacatagttggaacaaagaatgaatgtacatttgctgagatgccagcagatattaaagccatcaattcatctacgatcaacaatgtatctatcaacgaagttgacaaatgtatagctactaatattgtgacaacaagtataaccatgccgcaagttacaaatatcattgatttaggagttagaataacaagtgatgttataatcaaaccatatctaactgacgttggaaaaaacatcagatttttcaactatagtaaacgattatatagttgggcagagatgactcaagctaggggtagagttggtcgtgtctccaatggtatgttctatggaccatgccctgacaagacaacacgccaatcgaatattgatgcattattgaatagttgttatacacgtgttccatgttacagtggtttgctacatgaatggcaaatggttaatcagaagaattatgatgaagtagtcaattacttcaccacacttggcaatacttttgataacaaacccacatggtgggaagagtttcaatcatggcaggattcagttgcagagctattgcagtgtaagaatgccaaccaacaaccagtgtttgttgatgagtacatcaacaaagaggatatcttagctttaatacctaactacattggcactaacccaatttcaacaagtttgaaacatgctaaacatagagtaggcgctttacgttatagttgcactattgattgggataatgtgctacctaagcacttrtatgaggctacagataatattgattttgagagcttggtgatatctgttcctgatagctcacaatttcttaatatagaaacagactcaaatgaagatatagcatcaaaactacggttactggctattgctagtatactaaatgctatcaaagggttaatggcacgtggtcagatttacattaacacgaacaaatggagtgatcaacatggccaatatatattatatratagtttagaagatgcacaagcactatcaggcattaatttatctgaatatgacattattgggctagttgatattaaaaaatcaagcatgcgtattacacattaccagcaatctaataagtgggttggtcatgttattgtaccaacatacaaaacacaccattatatgggccaattaactgatataggtctaattcgcgatcgccaagcaccattggttgacacacttcgcaactcaacgttatacgtgggtccacctgggagtggcaaaacaaccatgatgattagtgagaataaatcttcatacaccacgactatcagctctggacaacttaagaaccatggtacatggttgcccccatcgttgatacctcatagtcaagaaaatattaatattgatgaagttgggttgttagatgtttccgtcatattgtctcttgcaagtcgatctaacaaattaactggtactggtgatatcagtcaggttgtgcacatagctaatgagacaaatgcctattatactgggtttgacagtggcattgacctgttttcaaagtatgcaaacaagatatatcttgacaaaacccaccgttttggtccacaaacatgtaatttagtcgccaaattagggtttgaaattattcctactaatatggataaggtcgaagaaattaaaggttatgtgtgcgcaataaatgataacaaatcatatagtaaagtgttaattgcttctgaaccggatgcaataatctgtgctactaaccatctagcaagaatgttcaggaaaattacacaaatcccagtatataatattgctaaatgtcaaggtattgacacacctaatacattagttgttttgcagggcgggcaaattgatatgctagccaacaatcagttgtatgtagctctaactagacatagccaacgtgtctctatagtcgttgacccacctcatgcagcactattaatgcaattatgtatcaaaacagaaaatatgatatcatatactgatgcgctcggtggtgcaagcaatattacacaaccgattcttaaccatattatagagtcaaacaagaataatctactgaaagatgccgaagtgatgaattatttaacaactatctgtgctttgcagtctaggaaaattacaccaaacacaatgattgtgatcatggatcagatgaatttccattacaagaattgcccattcaggtttgttagattaagaaaaattaaagatattaaacaattagaatgtgttgttagcatatatggcatccagtgcgtggtgtatgatgtttccctaactaatgaacgtgaattgctcagttgtttactgagccaagtaacaacaaataaacatgtcaaagaatatctacgtaatctaccaaggaaatttatgagaacaggaaagaaaattggttacaacttatatctttggcttagtaaatttatgaaagataatattactatacttagtggttacttcaatactagtgaggatattaacattggtggcagtactgatctgagtcacataatatggctagcgatcaatggtgttcatagcgcatttatgacattagtgcacatattagatgatgttgggagtaagttgtccaagtatacggatggaagttacgcagctgaacaattcaaggaactgttaatcgaaacatggaaaaagagcaatccatttagctttggtgatttgaagataagtaatagcctcatgtcactttacaaattattccgagaccacctcagcaaaggtgttaacacattatgggatttcataaaatatgttgcaaatacactacgtgaatggtggcataaacaattcaatgtcgataaaccaacatattatgaacttgaaggcaccagcatgtctttgatagccactgactcaccatgtattaatataatgaggaatagttcggatggtgatcattcgctaattgatggttctcctacaattcccaatacgcaatatattacacaactagacaatttaatagacaattcaataataggttgggagaagaaagctactccttctccaacatgtgaagactgtcctgatgatgtacaggaagtcttggatgagattgaagttttatttgattatgaagaagaaactattaatcataacccaacagttagtactgagcaccttgaacccaatattgatgaacttgaccaaatgcggagatttagctctagtgagcctgtagaaacaaaagataatatgtcctcagttggcatagagcattcagaaccaacattagacaaatcaactcagatagaagaaaacaatccaattaaactagataaggggattaatgaaagtaagcaaaaccaatgcttatgcatggaaacatgtagtgactggcaattagctgataacatagtcactaaccttgatttgaatacttataaaccgaacttgatgggtaggatggttatagagaagataccagatggtatcaaaataaatttgaagttaccaggtgttggcaaattcaatgctgtcaccaaaaaatgctgtggagataatacacatttgatctatgtgactgtcaatggagagcagataacactcaagattgataaaacagcttcaggttatgcattatactgcatgccggatgtagttgatgtcaatttttctcagctggaacaagccataaaaatgttaagtaaactaggtggtggcaaactcaataatggtatgactttgttagttgattcacttaagatcacccgcaaatttattaaaaaattgattagattgacgcattataaattgaaatacatgatgggtagaatcaatttgcgccatcttacaagtaataggtcaaacttagaagtctatcgtacaatatgccatagattgcctacctcatatagtaacagtaaattcagtacacgtgagtgtattggtggtacagtattgtcaactatagagctagtaccgaataatgctgccaatcgcagtgaaatcttcatagcaatatacaatgtgaatggtgatacacaaatactcatttttacaaatgataataattattcaaattatatcacacgtcgcctaatgaccccaattgaacatggcgatttcgctggtgacagatcagcaattagtgcattgctcagactaggtattgacatcaaatcaattatgacacaagataatgacctaaccattaatgacattaagaagtggctactagctaacccactcacgtcaatgtttgatgtcactgaccaacggacttacaataatgccaaagaacactcaattgttgaaaaacatttatttactgacatccataatatattggataagccattagacattaagtatgcattttgtataccgagtggccatggtaaaacaacaacagttaatagaatacggagaagcaaccaagagttcacagtccttgacgttgatgaagtacaagaacaagcaacaatattgcacttagggtttgaggataaaatgttaaattataaaggaaaattggaaaagtacatcacgaatagtacaaaaccaccagatgcggtattcatacattcgcctatctgtgcacctgctggttacaaagtcataataatcataaatgatggtgctgatgtcccattggatagaatctggtctggtaaaaacgtcaaccatcttgagagtatgaataatataatccacacccgaaattatgatgatgtatataatgtaactatcaactacttaaacaaaaaattaactggtgatatcactttagaggatggaactacaattgttgataatattgatagtatacttggagattcatttatgaggaacaatcctggatatgatgatatctatagattaccaaccggaaaacaagatatcttaaatatgagtactggaaatattggtttaggtgaacaaagattttttaaaacgggaccacacccagaagtgatgcgtccaacagttaataaaataccctctgctttaccgaatgctattatgactagattgatgggtcgtgtgaaatatagaacagttgaccttggtatcaaggattaccacaaattaatgactaaattcttcattagtggttatgaatctaaacttgctagttatacagatgatccaattaatttgaattatgaagatatactatcctggttagtagccaaaggtaataaaatacaactgttagacaatatgttgcgatctgttaaagatgatgagtttgctactgatccagctaacattaatgtgcattataaagtagagaatttaatgaaagagcaggtcaatgatatacttgatcaggttggtagagttattgtatggaataatcaaaatattaatatgtatgcgtgcccagtcattaatgaagccaaagcacgtttcaaatcattattaaaacctaatgttatttacactgatggtatgacagttgctgacatgaataaaagtattggtcagtatagaagcagatggttgcttgaaatggatctatcaaaacaagatagacaaacagatgcacaaatattaatttatgagtggaagttgatgggtatgttaggtgtacctgatatattgattgagttcatgacttcatttataccaacgttccgaatcaatggcacaagccatgagaccgctaaactaccagctatacattttagtggtggtgctatgaccagtatgggcaatgaaatacgcaatctattgttactatcagactgtattggtggtaattatgtagcaatatacactctgggtgatgatagtcttgttttaatgaacacaaaacctgatttagagttgtataaacgcatttgtgcaagccgacataatgtacaaaacacagcagttgctagcactaaatgtgcactgttcttacaaatgatagttgcgcgaaatgaagatggaacatactatttaagtcataattttgtgcgtttaaaggaaaaattagtgtattcgacatacccgaataccagctctgattggaaaatgaaatatgcatcatacttaatgatggttgggtattcaactcaaaccaagaaagcaatggaatacagtgggtttgtgtcttttccaagtctaggaacaacaatgtcacaaagagttgcagctaatgctttatataatgaaataaatgatatacaagtgtttaatataataaatgatataattaatgccaagcagcaagtctcagaagagataattatacaactacccgtaataatgactggtaataaactaaagtcaggtatgaccaaggttggtaaatatgttgacaatcataataaaatgcatgaactattaatgcaatatatggaagagcatactgatatttag

SEQ ID NO: 1188 - DNA, 10380 bp, Sclerotinia sclerotiorum betaendornavirus 1
  source 1..10380: mol_type = other DNA
atgtcgcaaacaattacaaacacaacctctacgactacaacaataaccgatgcacaaacaattacacataagagggcttttgggtccctctcaaaagattacccaaacaaaaaccatcaacgcggtttaacttggtttgatgttgttgacccacctaaacaacagaaacattggcccaaacttacgcctaacccgcgatggaagaaactatcaacgtctgtgaatgcagttggtaaagtagaacttggtggtgaaacccaagttatggctagttataactgttggcagtgcatttttggttacgatttaggtataaacactgctatctctcttgaaatgattaaaatgactattatgtgtcagcctgaagacgctgcacatatacaaatccaagctagttatgccaatggcatgctgcatattgcaaacccccctggtttgcccacaggggagatgacacctgaactatttgctgcccagagaaaatttgttgaacatccaattgatgggtgtattaaattaattgaccttgttgatttatatgatgaaggtactatggttggctttactccacgtactatcacagagaaattagctaatgacataggtgtagatgttaattctgttgacacacaacagcttaagaaagccatttctgactctgttaatagccgcggtacgagagctgttactaaattcactgaccaggcaattattttgccaaccagttgccctgaagaaattgtcaatgatctaaataatgagtttggcaatgcaacgtttattcgtggtaataaagagcaccacccacatatttaccacaatgctagtaggaaggcagttacaaacttattatgcggttggcatggtagagatgcactcatatatgatattggtggtaacccagctagccatcttaatgctggtcgctttacagtacacagtgtctatagtaaaaatcaagcagctgataacgcacgacatattaaatggtctaagcaatgtgtagcatgggcacgtcgcaacatgaataatgacagtaatcattcagttgtcaatggagtagccaattcaatacttaagcccaatagtgcgctttggtgctcggatggaatcaataactgtgtccactccagcaaacaaggctcctttggtatttccattgatactttatttcacttgccagtcattgatttgtttgacttttatataaggaacaaagttttccatacggtgcatgccataacattgccgaacaactactcatacgcaagaaatggtgcgctaaagtataatgaaggccattggtataaaaagaatgatgactggacgatcgagtttaatggtgagagcttagcatatagccagagcgttgccctcactgatacttatttaaccgtgcctctacataacattggtgagatggttgtttattgcaaagtatccggttataagggtgcccatttaatcattgaacattacctgattgatcgagcacaacttgatcaattataccttaaacatgtaatgtggtttaataccaacatggatgaattgtttgtcatggtgccacgtatcaatatggatgaatcatccactgtcatgggcaggatcccatacactatggagcaggtagtcattaatgtccgtttctatgaacgtctcttgaacagattgatgcaatcttacacttgggacagtgttttatcttatgccgctggcttgattggtcgtgtttacgcaacatcaagtggtctgcacatgaaatggaatctaaccaattcacaagtgcgtgaccattgcctgatagcatactggaccactaaccgtattaatgaatcaattaaaccattgctcgctcaggcagaacgcgcatcccgagatccagatttcctgactagcttatggaattcattaaagaattggctaaaagattttggctcacagtttgacccaactggaaatgccactgttcagaaatttattgctgacaacaaaggtgatactcttaggcttatccaaatgttcaacagtacagtgcgcagtgttgaatcactcaacgttgctacacaaatggtacattcaagaagcgttgttgattgggttgcatcgtccactggtgttagctacaggcgtcttgatgttgacatcgacacctggcgactaaatcaagatacaagtggaaataaattgacagtatatgaccatattgaatttaaagatgctaaaccagcaggggtaaacattggttgcgtaactaacaaatcgtgtccacacgaccataaaccattccatctacatctttcagatctcaatcgacgcatgggtaattgtgcttgctgcggagtagttagtaatttaaacattacaaaactctgtactatatgttccgatagattaccttgccatgggaagaacttacgatgcacccatatgcatgagcaattaaatgatgaatgttgtttgtcagcgaaatgttgttgcgaaaaaaataagaattgttcttgctgcggtttaccatcagttgacacatactgtaaagtttgtcaatttcaacctgataaatcaattaaatcgcaaccagccgtagctgttaataaagataacgtgactattgcacctattccgttacaaccgaacactgttaaaaaagaagcatctgttagattcacatttgaaaagccgcaagttatcaatcctgatgttgatattaaagacaatacacttactaaccatccacttgctgatagcacaaattctcaatttgatatactaaaaaatcagcaggttgatgagattattacatttgataacgaaacaatcattaataatgataatacagagatatgtagtgttgatgctgactctattgcaacagtcgactctaataatgatgatattcaacttggtaacaatgatgtcgttccacttctacctgaagaagaggttgctggcaccgagcaacttagtacactaatgagagcaatcgtgagtattgaggatgttaacccaggacatgctgacacaatattaacgagactaccaccacattaccagggaggtgtagccgttcgcgttgttggttatactgatgtgccaggtgatggcacatgtggtgcacatgctttgagtgtagcacttgggctaaacgtggatgatgtgaaacattggttaactatcgcgactggccacgatgattggcataattctgaagaattagctgcttgtgctctagcgtatggccgtaatttaatttgcgttgatatcggtgacactaccatttatagaggtggtgatcaagattatgctggctctatcatacatggtactgtagttggttgtggtgcgcattggttggctggtaactgcaacattcttagttactcatcactcttcacaaacaaattaatgactgattacaccaacttactgagagcagctcatcttaccctaaatggtagcgatcaaactgcactcgcttattcacatagtgacttagacatagacagcattatagacatgaatggcagtattgttatcagcaatgaagggatctccatagaacataaaggaggcaattcaagatgtcaaatatctgataagtctgataatgtcaagatgatagttggaccaacaggatctggcaaaactaccactgctttccaacatattgaaggtaaagttctattaatcacaccgttacgttcagcagtaactaatagttacgattatttaagtaataaagttaaggtagttgcccgcgcccaaggtgtatggattcctgagaatatcaacacaaaagatataactaaatctgacctagtaataatgacaatggaaacactgtattcaggtatattcattggccaagatgggaaaaatatttatcatcaactagtatcagcacgtgctatcatttgtgatgaagtacatgagatcagccctcattatgctaggctattgactgttttaccaaagaacaaaacatatatatgttcagccactatgcctggcattaagcttgactacaactgtaaatttgacgtgataactaactttgtccaaggtgatgttgttgactattggtttaatgaagtaaagtctagtaaaacaatgccacccaacacatgttatattgttgggacgaagagtgagtgcacatttgctgaaatgccagctgatattaaagctattaactcaactactatcaataatgttgatattaacaaagctgacaagtgcattgcaactaacattgtgacaacaagtatcactatgccacaagttgcaaacattattgacttaggtgttagaattaccagtgacgttatcatcaaaccatacttgactggtgttgaggaaaacattagatttttcaattacagtaaacgcttgtatagttgggcggaaatgacacaggcaaggggtagagttggccgtgtttccaatgggcaattttttggtccatgtcctgacaaaacaactcgccaatcaaatactgatgccattttgaacagttgttacacgcgtgctccatgctatagtggtttgctgcatgaatggcaaatggtcacccaaaaaaattatgatgagacagttagttacttcaacaagcttggcaactcttttgatactaaaccagtctggtgggatgaattccaatcatggcaaaattcagttgcagaactactacagtgcaaaaattccaatttacaaccagtattcgttgatgagtatatacataaagaagacattttagcattaatacctaattatatcggaacaaatccaatatcgacaagtataaaacacactaaacatagagttggtgcattacgttatagttgtgcagttgattgggacaacgtgttacctaaacatttgtatgaggcaactgataatattgacttcgaaagcttaataatatcagttccagatagctcacaatttctcaatattgaaatagattcaaatgaagatatagcatccaaattacgactcttagctatagccagtatattaaatgctattaaaggattaatggcacgtggacaaatatatatcaatactaacaaatggagtgatcaacatggccagtacatattatatgatagtatagaggatgcccaagcattatcaggcattaatttatctgaatatgatattattggtttggttgatattaaaaaatcgagtatgcgcataacgcattaccaacaatctaacaagtggacaggccatgttatagtaccaacttacaaaacacaccattatatgggccaattaacagatattggtttaatacgagatcgccaatcaccattagttgatacattgcgcaattcaacattatatgtggggccaccgggaagtggtaagacaactatgatgattgatgagaataaatcttcatatactacaacaattagctctggacagttgaagaatcatggaacgtggttacccccatcattaataccacatagtcaagaaaatattaatattgatgaagttgggttattggatgtctcagttatattatcacttgctagccgatcaaacaagttaactggtacaggtgacattagtcaggttgtgcatattgccaatgaaactaatgcgtattatactggttttgacagtggaattgaattgttctctaagtatgccaataaaatttatttagacaaaacccaccgttttggcccattaacctgtaatctagttgcaaaattagggtttgaaattaatcctgtcaatactaataaaattgaagaaattaaaggttatgtttgcgcgacaaatgacaacaaatcgtatagcaaagtgctaattgcctctgagcctgatgcaattatttgtgctactaatcacctagcacggatgtttaggaggatcacacaaatccctgtatataacattgctaaatgtcagggcattgacacaccaaatacattagttgtacttcaaggtggacaaattgatatgttagccaacaatcagttatatgtagccttaactagacatagtgaacgcctttccataatcgttgatccaccacatgcggcgctgttaactcagctaagtgtcaaaacagagaatatgatatcatacgccgacgcactgggtggtgcaagtactattacacaaccaattcttgattatattgtcaattcaaatagaaataatttactaaatgatgctcaggtggtgaattacttaagaacaatctgtgcgttacaatcagggaaaattacacccaatactttgattgtgatcatggatcaaatgaatttgcattacaagaattgtccatttaaatttattagattacgagagattaaagatattaaacagttggagtgcatcgttagcatatacggtatccagtgtgtggtatataatatctctttgactgaagaacgggaattactttgttgcttattaagccaagtgacaacaaataaacatattaaagagtatcttaaaagtttaccaagtaaatttatgacaacgggaaagaaaatatgttataacctatacctctggctcagcaagtttatgaaagataatgctatcatactaagtaactacattaatactaatgaagttattgatattggtggcggaattgatttaagccatattttatggttagcaatgaacggtgttcgcagtgcctttatgacactggtacacatagttgatgatgttgggagcaaactatccagatatacagatggaagttatgctgctgaacaattcaaagaactgctaattgatacttggaagaaaagcaatccactaagtttgggtgatttgaaaattagcaatagtcttatttcactctataagttgtttcgtgaccatctcaagaatggtatcaatacattatgggactttgtccaatacatagtgagtgcaatacgagattggtggcaaaaccaatttaatgcaaataaaccaacttactacgaacttgaaggcaccagtatgtcattaattgccactgattcgccatgcatcagtgtgatgaggaatagcttagatggtgatcattcactgattgatggctcccctatattcataaatacacaatacatttcacccctggataacttagttgacaattctgcaacaggttgggagaagaaggctatcccttcaccaacatgcgaagattgtgttgatgatacgcaggaagtactggatgaaattgaagtgctgtttgattatgaagatgaaaccaacaatgaacataacccactagctgataatattaatcttgaaccaaccatagatgaacaaattcacataaaagaacccagccccagtgaattcgaagataaaaaagaggacaacaaacaagttaaatgcttatgtatggaagcatgcgatgattggcagttagctgacaatatagttactagccttgatttaaacacttataagcccaatttaatgggtaggatggtgattgagaagatatctgacggaattaaaataaatttgaaactaccaggtgttggcaaattcaatgccattactaagagatgctgtggggataacactcatttaatatttgtgacagttaatggtgagcaattaacattaaaaattgaaaaaacggcttctggttatgcattatattgtatgcctaatgttgttgacgtcaacttttcacagcttgagcaagctattaagatgcttagtaaattaggaggtggcaaactcaacaatgggatgacattattggttgattcactcaagatcacccgaaaattcatcaaaaaactgattagattaacacactataaattaaggtatttaatgggcacaatcaacttgcgccatctcacaagtaacaggtcaaacttagaaatttaccgcacaatatgccatagattgccaacttcatatagcaacagcaaattcagtacacgtgagtgtattggtggcatagttctgtcaactattgaattaataccaaataacgctgcaaatcgaagtgaaatttttattgctatatacaatgtaagtggtgacacacaaatactcatttttaccaatgataataactattctaattatatcacacgacgcctaatgactccagttgaacatggtaactttgctggtgatagatcagcaattagtgcattgctcaggttgggtattgacatcaaatcaattatgacacaagataatgatctaaccattgatgatatcaaaaaatggttgttagccaaccctttgacatcaatgtttgatgttactgatcaacggacttacaacaacgcaaaagagcattcaattgttgaaaaacatttgttcgcagatatccacaatgtgttagataaaccattagacattaagtacgcattctgcatacctagtggtcacggtaaaacaacaacagttaatagaatacgaagaagtaatcaggaatacactgtcttagatgttgatgaagtacaagagcaagcaacgatactgcacttagattttgaagataaaatgttaaattataaagcaaaattggagaaatacatcatcaatagcacaaaaccacctgatgcagtattcatacactcacctatttgcgcgcctgccggttataaagttataataattttaaacgatggtgcagatgttccgatggatcgaatatggtcagataaaaacgtctgccatcttgaaagtatgaacaatatcatacacactcaaagttatgatgatgtatataatgtaacgataaattatttaaacaaaaaactgactggtgacatcactttagaaaatggagctacaattgtagataacattgatagcatattgggagatgcgttcatgaggaacgatccaggatatgatgatatctatagactaccaactggaaaacaagatgttctaaatatgaatacagggaatatcggtcttggagaacaacgttttttcaaaactggaccacatccagaagtaatgcgtccaacagttaataaaataccttcagctttaccaaatgcaattatgaccaggttgatgggtcgtgtgaagtataggacagttgacttagccatcaaagattaccataaattgatgactaaattctttattaaaggttatgaaacaaagcttgctagttatactgatgacccgattaatttaaattatgaagatatactcaactggctaatagccaaaggtaataaaatacaactattagataatatgttgcggtccgtcaaagatgacgagtttgccactgacccagcaaatataaatgtacattataaagtcgaaaacctaatgaaagaacaagttaatgatatacttgatcaagttggcagagtaattgtatggaataatcaaaatattaatatgtatgcttgcccagtcataaacgaagctaaagctcggtttaagtcgctactaaagcctaatgtcatttatactgatggcatgacagttgctgatatgaataaaagtattggccattataaaagcaaatggttacttgaaatggatttatcaaagcaagataggcaaacagatgctcaaatattgatatatgagtgggaattgatgggtatgttaggtgtaccaaatatattaattgagttcatgacatcatttataccaacattccgaataaacggtactagccatgaaactgcaaaattaccggctattcattttagtggtggtgccatgactagcatgggcaacgaaatacgtaatctattattactatcagactgtattggtagtaattacgtggcaatttacacattgggtgatgatagtcttgttctaatgaacacaaaacctgatttggagttatataaacgcatttgtgcaagccgacataatgtagcaaatacagctgtcgctagtacagagtgtgctttgtttctacagatgatagttgcccgaaatgatgatgggacatactatttaagtcataattttgtgcgtcttaaagaaaagttagtatactcaacttacccaaatactagctctgactggaaaatgaagtacgcatcatacttaatgatgataggatattcaacccaaaccaaaaaagctatggagtatagtggatttgtatcatttccaagcctgggaacgacaatgtcgcaaagagttgcagcaaatgccatatataacaaaattagtgatatccaagtgttcaacgtgatcaatgacataattaatgctaaacaacaagtatcagaggaaataattatacaattgcctgtgatcatgactggcaataaactaaagtctggtatgagcaaagttggtaagtatgttgacaaccataataaaatgcatgaattattaatgcaatacatggaagagcatgctgacatttag

SEQ ID NO: 1189 - DNA, 9654 bp, Tuber aestivum betaendornavirus
  source 1..9654: mol_type = other DNA
atgcttgatcaaggtaaaactcaatttttgaaacctgaaccagtagaaggttattgctggcacgctttaggccttgattatgagaataaagtctcaaaccatgaagcagccaagacaatgaaggcatcattgaaactgaatggtatgctctcatctgacgccatgactatggctatgcataaaaaatttagtccgaatagacagatgtgtgttgacattgatgatgttgttgaagattatgcaaagaaagtcaagcaattggaaaactacttggatgaaccagttaatgatttggacttggattatgctaacagcggcatgttcacattttctatgacccgctatagagtctcagtccgtgagagttacaccacttcaagtctgaaccttggaggcaacgtgtttgagaaaactgtggtcaccacaaccatccatgttgttcgacatgacacaggtattaacccaaaaaatatgttggatctgttgattttctatttccgcacacctgggaagactgtcattggttatgacggggacagtgtgcccactgaggctgagtccatggctgtgtttttgaaagcaacttcctcttcaatgcaacacaattctgacttccaaaacaggttgaaagaaaaacagaaaagagtgttggcacatggtatgagagccaaggggactagtcccatccctgtacctcagaatagaattgatttagtgccacaattacaagcagaattcccacaatttgactttttcccaagttcatcattagtttcaccacacccttaccaccatgtgagtaggatggctgtcactaacactctggttgattacttcccttccaacatacctttattcgatgttggtggtaagtttgatagacatatacatgccggtaattataacgtgcattcatgcttcaaagttgaagacccagtggactttgctcgaggggtggacaatatgttgagtttggtgaaaaaacggttgactaaaatcaacagtgtgagacctggtgaaaatgaagaggctatacaagctatgctttcaatcacagatgggtcacacaaatatttctgttttgaagatgctgaaaattgtcaagtgaaacctagtgatgagattggattttcaatgagcatgagtgtcgacactttgtggtttctgtctatggaaacccttggcaacatttatgttcaaaagaaaataattaaagcaaagcatgctttgaccatcccggatggtcttttatggaaggatgaagggaaactgtctaggggtgaaggtacatgggctaaacgtaatggcaaattgatcatgaatttcaatggaggaagtcatgtatatgttaattctgtcaacaccattatgatgtacctaaccagccctttctttatttatgaggacttcgttattgtaaatcgtgttgacggcagattgggaccttacacaatttttaaccatcatgtgatcccaaaaactgatttcgttgaaactatgtctagttcttctcttcatgctgtttggagtagctctgaccccgatattgttattatgaaagtgccaaaaatcgatattttcaaaccagtaacgttattattttccgaaccatttagcctagtgaaacaggaaataaacttcaaatttatggaacgacttaagctgaaacttttgtccgacatgtcttttgaggaagtgttggaacactgtcaaggtctaatgacgagtcgcttcttgagtacaactggctacacaaaacgtttcaacatgactgcggaatcagtcaggaatcatgccataattgcattctgggaagctcatgaactcactgaagctttccagcctttggttaaaagggcatcccaaaaaatccacagtctccattggtggactcaggcttggaatgctataaaacaagtcttcatcaagatgggccgtgagtttgacccttctgagaactcagagttaactaagttgattgagcaagggtcacatcgtgattttgagattgaaagtcttttagcggacactatgcaggaattggaccatttgcgttccatagtgaacaatggcactagttcttcgatcttccaaataaatgctccttattatgctttggtgtatggagacggggctaagaacatcctgaccaatgtcaataacttgttgtgccaccctgatttcaaacgcattcacatgcatgaaatggcatcaaacgatgaaacccctgtcacaacagcagagtttgtcccctgtgtgtttcctgaaggttttgcaccagttgctgaccacagtgtaaaacatcagcacgttttaccatttagcaaaaattcaacaggaatttgtaaatcgtgtggtatattctctactctgttcggccaacaatgcgtgctttgtagtcgagtggcaaaatgtgtcggggctaacaacagttgcccacatgcgcattctaagaaaaatgaacattgttgtggtttggacaactgttctcatcatgagccaggagtttttgtcaattgggttacttgtttctgttgtctcattccaagtgtgactaacccctgtttagtgtgtgacaacacagacatccttaaaccattgaacaatccgaatgagcctgagttgaacaatgatggacagcaagttttacctgaattcaacccggaccaggaggagactcaaaccataaatccttctaagaaagctgaaggtccatcaactacaaaggtacagccagaggagaccggcaacaggattgatcccaatgtcactaatgcagacctagcaaagcatgttgagttcaaaagacttgatggcactaaagccggagcctgggttctatgttggaaggtccgcgagatttgtgccccagtaccagggtcgaccacttaccaacatcaacataattgtccagtttgtggcaacacttatgagcatgctcattcatacaaaaaattaacccattcaagaagattgagggactgtaagtgtcttaagccgtcaaggataaatatgttgatgaacatcatgcagtctgacattagggaaaaaaccaaaaccccagccaaaaatttccctactcaaactgataagactgaggagaaccgggaacaacagactgttgaaggggggaacaaactaagtgacgttggtgacctaacaccctcacaaccatatgaacatgataatggggaaaagggaatagtagagaaaccatctccatcagctcaggcaccagatgaaagatctctccttgaatcagaaaaagaaaaaggagtaatcagtgccaacaataacattgagcccgttggatcaggtgttcccagtatcgaaccaagtatttctaacttttttcctgttcttcctttaaccaaagaatttccctggccgtcttctgttgcacttggaaagaacaagtctaatgagaaagaagaggagtcgcctcaagatgaaccaggggcaattgaggaaacaacaggaaaaaaagatggggaaaaagagagccttgacgaagaaaaagatgttgaacacgcacctgttccagttgctgttggggagaaagcgtatgaagttccacctccttcaatcccatcagacctagactcagattcggagaatggagatttctctgtcgccatggagtttgattggggtttcgatggagagggctttaaatctgtaaagccctgtcatgtgatggacagagagttacattgtcatcaatgtcgagtttgtggttcattctactcacattcacatagattcacatcagttttccataaacagtatctggctgagtgtcctgtttgtgaaagcggagtaaaactaacagtagtgtcaacactcattgattctgagggaacttctcatttacaagacttccaggataatgatgaggattgggttgacactatgattgattaccagcgtcagttgatcaaaggcaaattcataaacgaacccggagatttaagtagaactaagtcttcgaacatacctacagtgtctccttcattacccagttctcaacctgttgctgatctccctagaagttcagaatcatcacaattaattccagctcaccttgtgactttgaaagagaatctgaaattcatgttgaatgaaaaccctcacaggtctttgaataagttatctttcaaaccaaaatcaatcatcactagggttaatgtgctagtaaggacattggtagaaaacagtgaggatggcaagtgtggagcagcctctttgtctctgaccttggaggaagaggacgtggcccgattgtcaagtgagattgaagagtgcacaggcaaacctgatttctgggacaaacgtgagttgggagtacacgcattatcttaccgttataaccttgttgtggcgcataattctggtagttatctctattacggtgactcaacgtcagatgaatacattcttgtggttcatatgtatagtttgacagggaaattgcattggcaacaaggcagcggactcattagccccagcgctcgagagttctctgatgaatataataacatggctagggctgtagtgcacctttacaaccaatctcctgaaaacacaaagaaagttaaaactttctctgaaataccaatgatggctggttggttttcaaatcctagggatttgttggcaatgtcaaacccagtagttctaacattgctagagacttttggagctgattttatagatggtcaattaattcataagagtcagcagttcaagtcttcaattctgcattatataactgtgcaagatgggctgttgttgattgcggcacccactggacatgggaaaactacacgaattcattcagaattggtgaggaacgttctttctaagtcagggaaaaccctaattgttactccttctagagctactatcacgggttcctttgagtacattgcagagctgaacaaatgctcagtcgctgggcgggcaaaccaacaatggtatgcttcacctaagaaatttgaaaaaaccccttgggcagcagacattgtgttgttgactgtcgattcaatgtatgattacgttacgaaagtgatacaaggtgatcaaaggccttggggtgaacgttatttgttccttgatgaattccatgacatgacttggaagtatgcaaccatagttaaaagattggggcctgaaattacagggatcatgactgctaccctaacaccagaactggcttcagtagacactaaataccaagtgaccatgaagctctcagccatggagccttatgttgaggaatcagatgataaaatgggggctttcgttgttgtagggaaaaaaactgactgttacttgccagagacacatttgtcattgccacatgatgtgaacaaaaatctgaaaatagaggacatgaccaaaggagttcctctaaattctgattcaattggtatggccaaattggcgaatatcactagtggcattggcactaatgctgtcaccactggctccacaattcaacatgccaagttatgggtagataaaggcatccgttacaaagtgagttggaaaccagagaacgtgtattctccaaatcgaaaaggtgaaaacagtcatttagtggatgtggtccctcagcaatatagtttgtcagacatgttacaatcacggggaagagtgatcaatcaaatggacttgatgaaaaggcgattcaaattaattacagcagctggtgtcgggcctagtaaatcttcaaattacaggaaaaagactacaaagtttaacaaagaaaatagtttctatttgagtgacagagatgttattgatgcgttcaacaaaagtaaagtgtccgacttcgacgatttcatgattgaacggcttgaagggattatgagggctggcacacctggggactggaagcatgacacggactctgaaacaaatgatggaaatgaggatgaaaatgagtttgtgcctgaagtcctcactctgcatcacaataatgatgatcttgaggatgacgaagcagcggttgacccacttattaactgggtcactaaagttgccaccaaagggaaaaattatatcactacagccgctgatcatttcatttcatggttgaaaacaacttttggcattgctattgggtccttaaagactatcactccggttttagcctctttttttagacgattaattggttatgcgaacactccttgcaaaatcctgatagccaattttttgaaactaggaaaattcagtgtgaatttggtcaagagaataataaactggaccatgatgaagcttggtgtcctaatcggcatagattgcttggaagacttgagcgacttaattgatgacatgattgacaattatggggtgtcaatggattcaaaaaacccttcccttaaaacattttttggacatgatgatcaatcagttgaaaatgaagccgttgagaatgacatggagtgtatccaacaacagaggaaaagtcagacgctactaatcaacaaatgcaaattgaaaatgccaaagggccatcatttggcgaaactggtaagtaagattatgaaggagaaggatttgaccgatgaagagaagaaactgtttataactggaaaggctgtgtcatattgtaacaccaaaggtaaagccatggaaccagtgacttgggaaaatgtctgtaaatatggtggaaaagaccctaaagaatggtgcatttatttcactttctggcataaaatgattccgtgtcctgttaaattttataatttgggtggccatgtcctagctttcttaggacccgtaaccgggctctggacaatgaaagaagggaagagcacagacatccactggatgatggacagggcaagtataggagatgagtggtcttcaacaatagcagcaaagttgaactccattggtggttcaccttttgaaggtttcaaagaattcttactatcattgttaaattcattcatgggcgcttgtaaacgatggaaggataatttggccatgaagtacgaagtgctgattgggaagaaaactaaatggagtagtggtcgtaggaggcaagggaaagtaataatgaagtctagatggtataatgatgagcgttggaacattcaatacaaaaccacgttgtttaaaaaacctagttccactaaccttgttgaacattggttgtataaaccagatgataactttgaaatggacatcattttgacctgggagaacaagactcatgaaattgagattttccattcttcccacatgaacaaataccaagttgaaagatgtgtgaaagattgcgtgttaacaagtgtttattccacatctattcagccgaaggattcaagaggcgggaaaacagcggaagactattacaagaaattgataggtagagtttatgctaagcccacagtcagtgatagtgtgaataaattgattaaaagagtcgtgcttaacaacccattgatgatgcaatttgaagccgggctacaagaaataagtgacacactcgtcaatgatagacaaatagaaaaagaattaatggaacctggaccttcaactgatgtcacaagattctatgaagggcgtcaaataatttatgcaccaagtggatgtggaaaaacattcactactgacctcttgaacaaagagtatggagaaacgaaactggtggacattgatacattattgacaatcaatgacatgactaacctagattctattgtgtgggattggtcagcagttaagtcacaatatgtgttggctttcaataactgggtaaaagatcctaactcaaagggtaaagttttgatgtgtcattcacctgaacaaactggatacaaaaaaggtctgatagtgttacccacatatgacttaaagaagacttgggcacccaacaatcttaaaagccttaaacgaatagcaaaagcaaggcgaggttttgacgtggtcacagtgaactcatataatgatttcactaatgctattaaagattacataacttgtttcaatgacgatttcgaagatagtgcgaaatttcttagtaacaccattgactcgattgaaggtgatgagttttttaacttgaacaaggacagcacaactcaaacactgttgaggacacctgctgaggggaaagtggcccttaaaaatgacgatgacctaaaacttggaacagaaaggttctacgtattaggtaatttgcctgaagttaaccggcccaccttggacaacgcagcttacagtttgatgaatgccatcacaacccgtttacatggtattgaaacactccggaaagataagatagaaacaagtgaatatcttgaactttttcgtaaatttattgttacacaggaatttgactcgaacattcccacatgggccaaccatttgatacggccgaatcttgagagtacaagagattggctcatcaacaaagggaatttagctgctaacttagcaaaaatttatagatactcaatgtccaatatagaaagatttgatcctaaacgagccagagcccatttcaagtcagagaacttgatgaaagagatggtgttgagcgctacagaacaaatagggagagtgatcgtttggcatgaacaacatattagttctataatatgccctttaatgcaggaagctaaatatagactcaaaagcgttttgaaaactaaacatgtttattatgatggaatgaatgtgacttcgttgaattcccatttaaaaactcttaaaaaatcaaagcatattatttgtttggatctttccaagcaggacagacaaactgacagaccattattggaaactgaacatgaacttatgagattattgggtgtcgacccccttgtaatagaatatctaaagcaagctgaggacaagtttattttacgaacaagtaacaacatttcatctatccgacctggcatgagatggaccggtggggagatgacagctattggtaatgaaattagaaacttactgttattagcagatttggaagcccatggtcttataattgacaacagtttgactcttggagacgacagcatgcttttttgtgacaatgaactagatgaggaagtcatcaaacgaattgcaatggaaaggcataatgttaggtgcacttatgagtcaaaccacccagacatgggtctgtttgtacaactaattgtaggctgggtagaaggttctggctattgtgccacaccaagttggtggaggctggatgagaaactcacagtgtctaagcatagtcctggtagtctcgagcatctggcaaagtcacacagctttttgatgatggtagggtatgactcggacactgcaaaagcttcaaacatcttaggaatgagagtctttatcaatttaggaaccacagcgtatgagagacttagattgaatgcttaccagtttgagaatgatgagttaactgctttacaagtcaagagaaacttgttgagcaaaataacaaaccctttaatcagggtcatgaagattaagttaatggtcaactctaaaaagaaaacacctttgtatgctgaggatgaaattaaactgaatttcaattgggaaaccaatgttattgatgaatccatggcaaaaaagaaaaaagatttgattaaatctcttgagaaattgatttcaagaggaggttag

SEQ ID NO: 1190 - DNA, 21471 bp, Almopos endorna-like virus 1
  source 1..21471: mol_type = other DNA
tctcgagaagaaatcatggactgtgcaaagacgaaggaagctcaacctgctcccggcgaaagccgggagcgaaaaattaattataaacttaaaattatgggtgcttggtcgcctccgattgaggcacagaaccgcgtcaagaaccgcacagattacaacgagttgtactggtgggattacaatcactctgcttggtcatacagtgatacctggcggaagttggctcgcgggaaaccgagtacccaaaaaataaaacaaaatgagcaggccgcagaggaggaagcccccacgcgtaaggtcgggtcaaagactggttacagccgaccccggccacagcctgctcgtacaaaacatcacaaagtgtgctgcactaattgcagggtgatagattgtaaacatcagagccgcttcgagtggtttgggatgcatgtccctcgctctccgatgactcttttccaaccagtccatccagctcggagcggccacttgcccccatctatctcgaccattaaccgaagactcggtcgagcagccgctacattgatccttcggcgcaaaccgaccatcaaacgccgggctccaaagaaacggccaacgattgatcgagccgcgctatcccggtatttgtcttccatcagttttgacaagccagccccgaaaatctctcctcaggtggttgaaccctccgttgcagagaccatgaacccgaagcgtttcgggtcgattgtgctgccgagttgcatacgaaagttggatagagaatcctgtgctatggatttccagcgaggtgaggaatgggcatacagtcgtttggattttgctgacactgctaaagttatggttgctgaaaaccggttgttgggaaatagcattgagttctcctgcaagtgttgtgtttcagaggacaaggcaagggagatcgtcactggaatgtctttgagcgccatcacagaaaggcgagctgtcaagttgcttagagttgatcaaccagatgaggattgtgacctggacacttctgaccaaggttcacggtgcgattctgatagtgattgtgaatcctcggatggaacagacaattcttcgacggatgcggccgattctgattcgagttgcttgggggcggttgaggcaggacaagtggtggcgtctaaccggggcagatacaaggtggaggtgcaacctagttgtatcagcgggaagttggccacccgcactttcagtgaactgttggccaaacatggtggctggaccaatcttctggaattatcttgtggtcaaacaggattgcatatgcagtttgcggaccaccctcaaaggtttgtgacgaatgtggagggcggaataaatcatatccttagatgtccccactgctccaagtgctgcatgaatccggtcaatgattatcagtggcccgattatcagccaccgaaaaagagctggcccaaggatctaaaacgcctgcggtgtttggggctaaaagaccacgccggttcttggccgcacttcgtagaggctaatcatgatgctgctactggcaagaatgactatgcacccggcccattgccagagatgtttgaatttttgtgcccctggtgttttggtagcatgcataaattggtgaaatcccctccagctctgtactccatgttgtttgccgctgtttacaacaacaatgtgtgcggcacttggttgtcattccagatgctagctggttatggtgacgcagttgctgaatatgatgcagaatatttttcggatgcttcacgaacagattacaatttgctcaagaggaaatacgccctctacaaattaacagaagtcgatatgatttcaggtatggactctttggaaaggacgtctttgtttagtgcttacccgcaatgttctttccgtaggtcgatgacaccggataatgctaatgcgcaattgctgacagagtttaactgttgtgaatcgctggctatggcagagttgcgtgcatttgcaccattcactacttcattatatggccgcgctgatttcagtgatggctgcacagggtttggtggcttgatgcaatccgggtttttatcggacttttgctcttcagattgccactcagtgatggtctgcgtgccgaagtttgtggcgagacccaatgtttgtcagcacatgaaccataatcagggacgctaccaaagtgacggtgaatccctgtacatgatcatggaatgcacctccattgtttggaggttcaacttgcaagaattgaatgttgtgtaccaacatatgttcaactggaatggtatgtacatggtggtctcattttcccatgaggaaggtgttaatctaagattgatcaagctcaccaaaatacctaacatacacaaatgtgctcaattaaacaaaaccctatccgtagacacattcgttgccactatgcgcatgccaaaagccaatgccatccttaggcatttgtatatccctgtttatgaagaaattcaattcgaggtcaatcacaaattgattaacatgatcatttctcgcaatcttgatggcaatcttaactacagtgatgtatcaaagttagcaacggccatcattcggtcaaaatatgaggttcacggccataacactcactttgcttttatggatcccagcactctggtatatcacatatatcttgccaaggtactgatgataaggtatttgtccagtcgaggggtcttgaatccagattaccctatggcaaagctgctcgctgctaccgctattagtattttggaacacgtcatggctcccaaacttattaacttgttgtcccaatggaaaacctttaaggcaaagtatttgaagggcctttctgagagtgttcaagggcacctagattgtgccaattgggacaggatagaatttatgtgtaattttggccaagtggatccttcctccatccgtgcacccttttcagacacagaggaccctgaggatgtgatggcggactgggatttcggttatagcaatttaatgacagatgcagagttggctgattggctggagaattataatgctcgcaaaggagggggcgtgcggtcacacggcccggaaaaagtcatggaggatatcacagtaaagactgatgatactcggaacttttataaaaggttggtttcgcagatgaagcttgacccaatggtcaagtcatgcttgcaggctgaaacacaccacctgatgggggatggcgaacagaatttgacttggtgcccatacaaattaaattggaacgcacgtgggggtaacaatgacagccaccaccgttgcgtatcgtgtgttagagtcaaattatgtatggaccctcgaaacccgtctaagtgtttgaaatgtactggtttggatgaaccagaatggttcgagcacggcaattgtgctttttgccaggccaatgatggtcttggtgatatacctgagtccgagcgcgtgccattaccccagtggcaagctcaactgcatcagagatttgttgggggactcaaagccaaaccagcagagccgccagcgcaagatgatgtttctgatactttcccttccttgcctccgccccccagagctttcggcgaacctcaagtggggctcacgctcgttccaccgaaagataaagtttctgctgcagagcgagcactcaggagtggacagcagggaagaactaagttgctaaccactctgaagcaagtatcagctgggtcgaagcaaaaaaccgggctgaatgtggtagacgtagaagcatctgtgcaaaaaatgagagtcgatggtaaatctttggcattaagtaggtgcaaaatcacttctggggctcctagtggtcctaaaccatcgttcactaatttggctttggatgaactgtcggaagagaattggaatttgttgcttccgatggacgacgttgccaattttgggaacccacactgggctgggtgggagttgatggtgcagtttggcgtaaaggacgtaaccagccctgaccttaccgatccgtcttataactacttaggtaggctgcctttactactgtccgggagtgaacttatgtttgctcctttgcgattagggcaaccagtgaggtttcatatctggttggttaggttgaattcaggattgcctgagcaaatgaatcgtgcggtagaggcagtctgtggaatatgcaaccaagaagggaagaaaatcgtggtggttaacactttaaggacgtttcaaacagaatgtcgagcaaagtccatagtggatttaatgcgaggcattcatgcagcccaggatggcggtcaggtgttgataaacacacaaggagtggataggaagacctcgcaaatggttgtcaaatgtagtgacgagctgcgggattatatgtctattttgggcaaagagatatccgagttctcaagttactgcagggacggctatgtcggcaggatcacagaccagggcaaaatggacacattttggttgaggccaggtgagtacaccgctcttaaccttcgtgcgaatttttctggacctagagagtaccctctagagttgatggatgccacaccgaaacaatgtgtcatcaatgcactatatgttatgtatcatgttttgttagcagacgtatttaacataacaggcaagcgagagaatctggaaattgatgatatcaagaaggtgttgaaggctaaacatcttgacctgttattcttggaggagggggacgctgatgggttggttaatgtacacttcctgctttttagtcgtcactctggcatggcaaccgctagagaggtgggcgtcatgtttaggaaagtaagacctgacgcgggctctgatcatgtgctgatcggtccagatgacatttctttcgttccaaccagtgataaatgtgcatggttaacagaggaaccctctgacacactggcggaccccaaaagaattccccccttcgatgagggagaaatgatttgggatgcaatccataaagccgagacctcagccatgttgcccaattcttttcatgtaacagatgagcgtagaattcatttcacgactcaagaatttatggaccgaggggataaaaaaccattcatcgttgtacctcatgtatcaactcgagataggcaaggcgagcgttcaacattatcctttccagtactcgcgaattggcgacagttcccgaaactatttggcaatttttctggctcggtggaaatctcagatttcatgcaccaacctatggacatagcgtttggatcctgtgataatatcaattccaaactgcagacattagcaatggataaagcaagatcgttgttactcgctatgcgcatcgcccctagtactccaaaagtaccaaagagacatgatagcgctatccaactggtgcttcactcccctggttgttatagatacgtcccactaccgagggacaaggcaggtgacatcatgtggttgcatgtcaaggatgacataattccagtgatgatcactcttaataaaaatcggtttggagttttggtggattctcttagggttttgaggccaggtccggtgaagattgagcggctccatgactcggctggctccagtctgcggttttttaaccaggtggcgaatttgagactgactgatgaccatttcatgtccttaattgagcattgtgaggttcaatgtggagttcctggtgcggggaaaaccagagactatgccatcatggccagcttagataagacaatgatcctacattgcagaagttccaaactagcaagcagaacacggatgcgccatccgggtttgcaggccgttgggccggaggcgtgggcagccaatccaaagactgattactccaccctcataatggacgatgtgtcctcaagtgacatcctcgatgtggcgctggctttgtctaatgatgtgaagaaattgattctgacaggtgacaaattgcaaggccgaccagctaccatgttctgttctggtggtgagcatgagcgagtcagcgtgctggatgtgatcccggaaaaatgcttcaaacccttgcttaacaagactcatcgcattggtaacccttgggcttccatcctctcatatatttaccctgatattgaagcatcagatgatcatgagactcatgggtatatccacaagtataatggggatctagcttttattctagcagggatatatgaagaccatggtatcccgcacagttgccggtacggcgaggaatccgttattgtccttggatcaatgcgtgtacaggaagatttggtgagagatgctatgaagagtctgtctattacgaactatgagtatatgacatttgcggcttctcaaggaaacacttatgagcatgctgtgatccttaagggagaaaataatgtggtcggttcgtcgggagatgtattcaatatgaccgtcgctatgtcacgggctaggttgactaatcacattgttctttttcccgagttccatgatttttcagctgcagatgtattgttggggtccatggaccctggtaggagtccacctcccaaacctatggccgctctggaggtcatgcacggtgggatgcgcgacctggcagaggtgctgatagagctgatctccgagattatgatctcgcggttacaaccccatcaaacgttcacattgacctacaatgagcccaccaattgcttagtcttggatatcttcacagatggggtcttggaggttggtctggacatagatttgaccaacttggcaatgagcaatccaagggcaggatattatagcgtacgtatggctttaaggatggccagcccttttgttactcctctgatctgcaagagttttatgctggatctcggagcctggacaacagagaacagattattattcgatttgcgcggcattgacacgacattacaacttaggcaattctctagagcgctaacagcggcagtcatggaagctatatctcaagaatttggggatactgtcaccacggggtctatcataggtatgataacctctggaggttccagtatgatcagaactatgcgcagatgccttttacaacaagtggagacagtcggagcagccccatttttaattccagaagaacgtgtagatgcgttaggcggaattactgatgaccaagcggcctgtgatgcagctcctgcagaaccgaataaagacagcgatggggatgcttcctcagagtacggcactgtactatcagggtctggggatgacctcccaccgctatcgaacgatactcctccagatcaatctgggtgcgagcagaccgcaatgaccgccgccaccccaatggcttctctcttcactgggctgccctgggtctcgactacagcacaaccatctggcgatgaggagttggatggaatgagtgggcaattgcttcaagcatcactacagcagggtcgtgcaggtgatattttagatgaagtcaccaggttgcgccacatgggcttggagccaaatgatgggtcagacaggctatttacaacagactcatggtggggcaatcacgagagtattgtgtggtcgatgcctggtaacccttcaagtatcttaatgacgtggtctgaagagcccaggagttatagggtcagttatgcgggcctcatggaccctgaccctgtgggcgtcatcatagccacgaccatagaaggctcttggactctggctcttcggcgccttgacgaagaaatcgtccctttagaacctccccacatggattccttacgcttgtgcttagctgaggtggtcaatggtgaatccccgagtgaacctaatcgcgtccgtttgtcatcaattcgcggtctactcaactgcttcaacatgaggactggcactttgaacgtaattcagggacggggagctgatttgctggcagaggccgacgttttgatcagagacatggcagcagagctctctgattataatggattcgagattgccggttgtccatccgccaccgtcttcgtagtggcactcatgttggaacaaatcggttccatcaacaacctcggtttgaccagggaattgtcaatctctttggcagtactgctgggatcgacggttcgtgaggtgagtgtttattgcgttgcgggacagctcacaggaggattcatttccctacacacaactatctccagtgtggtcgccaggtctaatgtgttcttgcacatgcaaccaactgatgctgctccctttaactccgagatgatcatgccggcagacatagaattgggtatggaactgttggaccatgtccatcacgatgaggcttcaatggttgcaaggttacacgacgcaagaatattcagatcctgtttgatcggggatgcaacttttaggacctctttgatgcataggcgccaggttactgaagacgctcggagtttcctgatgggagtgtcagtggaaagcaggtataaagggattatccgcactcttattttgacgattagttgcttggattatatctggaaattgggacgagagaacgacagacccatggagatgtatgacgtggtaaatgccgtcaacttactgttggaatctttccacaaaggaatcaaagtggctacaatgtacgctggtcgaaccatgatggtgcaagcatgggtaggcaaaaagatggtagccgcagtcaactcggacaccgatgtgttatacattcaagcgtgctcgtttggtgcggctggtcatgggttgccacctgacgtgcttattatggtgcgcgaagctatgtgggccccggatcagattctgaagcccagacaaactttcttgttgtatgctccaggcctcattgtatcgactgatttgatcaagactgttactgcggggggctgtcctttgcttgtcaagatatcaggtcaggattatgagattattacatctccaggttgcgggttttgctgcagcttgtcagtccgcaacatcaccacacaggcgtgggcagttgtggcggcagcctacattaatcccgcccggccttatagaaaattgatcagtaacatgagtgatgctgaatttagatcagtgaaggaatggatttactcttcttctttgtctggtaataccaattggcaaaccatagtggatgctgctgccgtgataatagatagattgaagtgtggtgtcatacccggcatctggtcaaaggtgagaggccaccagtccacaaatcaccgtaagatcacttcgattaacactaaacacctgatggatgtctccaccatggggggaagtgacggcttcactatagtgatgccagaatacgtgccgaatgctgtcttcctggcgtttagccctttgatagtctatgaaaatgggtctaaggccatctttgatcctagcttgtccagaactgtgaatttaactcagtactcatctgtgttggctaggtgtgttaccttttaccagcaaaaccggcttcgcacgctgactgattctcatggattgaagtggaacctgtggggggctttggacgctggctggccgaagaacaccaagttaagctttgacatgcacagggaccgtgagactcaggcatttaagtattacatgaagatagtgcgacggatggaacaagtccggcacggttctgacactgttaatattagggtgcccattaatttgaggcatgaagtcaaaacccagttagaaatgctattcaaggacgctcaggttggagatgcaaatattaatcatccttacggggtggctgagatagcagccagccttttgttggcgagtcagagatttgacttagacgcatcccaaactggctgtttggtcatcaccacctgcccgtttttgaccattctcaacaccttgcatggttttacttgcacttgtggactctttacgggcaaccaccacaattttgtagctgggttggacaccgccaaaaccttgtgctataattggaaagagaccctggaggccagagacatgacggatgcaacggccgaggagcggcaaaaacaccaaagtgaactggacgacttgaataaccaaatcgcagggagagggggttgttggttctccgagaccgaaagacggccatcatccgctcccaggttggtctgtttggattgcgtcaattctaaagtcgtggaagagttttggtccaggaggtatgaggttatgtggatgttgccatccgtatctgagttttatcgctggcagcatcacccccgtgagcgaggggactggatcgtcaattgtggtcttgacaatagggcatattttgtcagcaggaagatggttgatgcaattgatggtggtgatcctgaggcaatcgtgattctggacaatactttattccgcattgttatctttagagaacacaaccagtgggttgcccctctggactatggtgtaaatacatttatggagttgcagtttctgcattttaatgctgattttatgtcgtgggacacagaaggcatgttgaggaagatgactgttaagtgttgtggcaggttgcgagctgcactcatctataaaatggctatggatccgaactgttcaaaatcagatttgttgcaatacgctaaattgaaggctggcactataagatacaactccacccactacacaaagttgtttagtgaaactaatgagatggtattaaatacggtagaagtggtgtggcaagagaaccataatgtgattcaagagctgaaggagcacgctttgcgtatcagcaagctgcgtgggcaaggcgggatgagagtggaccttgcattggctgaccgattgtccgacatgttgctgggggcatttgcccatgtgttgcaccttcttggcctggatgccagcatctcagatatcattacacagcttaaagagtggttgggaaggagacctctaaaccaatggacagaaggactgctcaaagtagcggatgatatgatattgtccacgaaagattatgtggtacctccgagaagagtgattgggacttctggtcctgtcaagttccaaaccacgggtagtcggttagaagagagtgcacgagtgctggcagaacaattgaaactagacaatgtgtactccgctgtcatggcagctgcaggtggtttatccgctgtactgcaacaacagttcgggttcgaaaatgatagtggttttatcctcaagttcaataaagtagcagttgctacactccgtgcgataacgtgttttggggataaatgtaagtctatgatcgaattcggtcacaaattattcaccactgattggatcacagtggctgctttcaaattgttccagaaggtcttgcgcgatttctgggacaaaagggacccctggcgttggaccaccgataggtctggtagaacttggcgaaccagttccgatgagtatcagcccacgccaccatcctctggccaaccatcgccagcaccgtctgaggaggatgatgctatctcagaaattgctagcttgacggagtcctttatcgatattacggatcgcacgattagtgaactcatgacgagtggcgctgcattcgaccagacccaagtcatgttagaactggtgatgacaaaagctatggtactacgcagtgctagccttgaagtgttgcgaagaagaggcgttagtctagaagatccaaggtctagggaagaattgagatacgtcgaccaggccatttggattttgatgtttttgttgaaagtgagtcacggggtcgacatgaggaccatagggataatgacattggccaactactttgaacgctccattggaggggaaaccaccaggacattcgctgagcgcatacaggcagaatttggtagccattgtcacgcctttatgtggcgaaaccctagcggggatttggagttcaatttccttggtaggcattgggaggtgccaacacagggtatcttgcagaacttatttcatcaagccaccaggagtctcaaggattacaaactcgggagctccagtggcggtgtcgcacctagttcgtccaaggaggctaccggagtggatgcatcggaagtgggtgaagagttgccaccggatttgatggcaaaactgattgaggctggtgaggatggaggtcgacgccaagccagtcaaccaacgcatggagaagacggcgggtttgacttggattactttgttgatgaagatcaaaccgtgattggcaggctaccgcgcgtgtcgacagtcgaaatcgggttgcaacccacagaccagcccgccgaaccctctcctgcagttaatccccctgaaccaatgggtgtggaagtaccagccccaccaaccccagtagttgaagtccccactccgcctcctcggttggtggccccgaccatctctgaggtagacaaccaaacaaaggtgtggacgacttgcggcttgcaaattcctttcacatggtccagttgtcacccctattgtggctggtccgggctcacacaaatgggagatccaaatcaagtatttttaactgagcgagtcaccgtgcacacagaaccagaggccgctgatttaagctctcgacctctcgtctgggtggttggaccagaatttgaaggggactctgatgccatgtatgacgcttttgtgctctcttgcatgaccatatactatccgggaaccgtccggagttttgaaaatattgcttcggccggttacatcaggttttatcttgtagttgtgttagttgaaggtgtagtaatagaatctgtgttcttgactagatcgagatcattcgccccagggagacggatggtcgattgcgattcattaagatctgtgcaggattgtctgccatcgatggtggatttgctatatgtgcagaatgatgatggggaggagttcttgctggcttcggtgatttgtatgatcactcaagctaaccgtggtagaaaagctaggctgataatgagagaagaaccgaagcattcatgctccgttaatccctgcttctatccggtagcctccactttgcaaacacagattggttgtcaccccgcagcaatggagtggtacagaagtcctgacacggcaaaactaccaagagagccatccattatggagctcatatggttgagccacaatctaacctctgcgtctaaccctgagctgtcacccacttctctgataccatggctgcagcgatcaatcttagacctacacaagattaatccggcagacttgtggaccggtgtgactaaatcatctgacctttcatactgcgtcaaaggtttgcaaatggtagtgggtgactacaagggaagagtgttgagccttcaaaaccgagacgcggacacatgcctgctagaatcgatcacaaatcaattaggtgtgagtgtgtccttgtcagaaatgcgggacttctgcttggagcgaaataattgggcagaggatcatgtgatgtacttgtgctccctccttaatcggagttgtgtaatcaagctgcgaggtaggacgagttgtttcctacttgtggcagacacatcatcctcttcccctgtggtcaaaatagtgcacacaggacgggtggccgacgctttgggcagaccagtgaccgcgggccactggagtcccttggatggggagatgacactcagcaatctccatcttgcatatgatctgtcgtcccatggcctgccggctgtcggcttgagatggttagtgtggaaaatagctaaaaagatgattgagcgaggggatgcacttgtgcgagtgtcaagtttatgcttgaacattcctgatccagcgagtgtcagcgtgccttatggatccggttccatggctgtgggctctactttgccacctgatgattcagggcgtagattgcaggtggtcgcagcgattgctgccagattggtgggtgcacggccttcagggttagctcccagatctaccgcgccacgcgcttgctgccctatggcaacgtcagagacgttcgtgtggcctcaaacgaaagacaggactagtcatgtaattggtttctattatccggggagggactcaccaattgatactcgttgttgcgcacagtttctatccaacttctatttaaatctgaaggagtatcctcctttccaggtaaccttcccaaatcaggtgtcaggtacattcaccaatggggaggccgcgttccaggctaccaagtttaggtctttggtggatcagttttctaagatgacaccccagcaggcatttgaagccagaaatcgttatcgtcagttggctgacatgacttatagtggtttcaaaagtaactggaatgccatggttgccgtcttggatgcaaaattctcgggcgacccattgaatgatctgattttgaccggcaaccactttctgatagagcacaataataaagtaggtaaagattcattctggtcagacaatcatgatggttccggccagaataggctggggatggcattaatgatgaaaaggtataaaagcagccccagcacgagtgacgattggggtgagtggcttactgctatgattgatgcatccacaggtaagttcgtggatgctgcttgtgagcaggtgtggcaggagagcgtggcattagcttcagcaatctgtaggaggaagggcactccaggtgctggggtgcctcctcccggccctgggccatccggtgaccactctgaaagtggcgggaacaaggacgatggaaagggaaaaagcagtggatctgatggaggtgccacaggccccgatggcgacgaacagagtcagggtagcaagcctttagatgtgggcagtggttctccaatcctgcacgcagctacccatgatggtgcgggggaaggtagtgatacgggagatgatatgcccacgctagtaccggtcaatgggccggagccgccaggtaccccagctcaagagttctctaagcaggcccctacggttgccgctttgtcatccgatcatagtctaattgaggaggaggcaaatcggtccactgactcctctgaccaaattgcttctgatggggcggctgacagccaattacaaccggcagtctctgctgccgtcagacggttgctatctgctggatttgacttttctcagatttttggcatggccactgacaccatgagcccctcgtttggcgaggatttgatcatcggtgggggtcatcaagaggagtgtggaacgccagtagagggtgcagcccctggtcctggtgacctggcagaatctgggtgggcgcgccccggttcgccactggattgcggtcaaaccgcgtcgacgcggggaaggagagcactacagtcggccgggaacttgatgggtgcaatgtcaacgggattgtcgaactccataatggctgaccctggcgatgagcctcctcccgcatcttcaaatagcgatactaccctctctgaagttgagttggaggcattcgactcttgtgaggagacagttgttctggctcctggccacagcgaggcgaaccgaggtgccggttcagatgggcccttgctggtagctgatcaagctgggtcactagggttgccaagtggtgatgatggtgcatctcagctcagttcagacaaattggtcctcgccgctgctgaaggagagtcaggagcgacggaatctgattcaaccccaacaaaagaggttgaggtagttgacactacaccaaaattattggataaacaagacatcatctctgttagaacgcattccaatattttgctagctctcttcggcacacgaggtgatctgtattggtatactaagattcacaatcacttgtgtaatatggggcgagttgatcataaggttgttgcggtcaggactcactgtgatcattgtccttggctatatcatcatgcagaggttaaggtggtgtcgggggatttccgagagttgtttgaggtacaacacctggtcggagtgacccagatgtcactaactagatcaatacagacggacatgattaaggtgattatggggtggaacttagatttgagcacattgcttgtgttcagtcacatgggtttatttctcttgaatgagtacttgatgagtcatggagcgagattggtgatggtgcatgctggaattgtgttcaagcagaatgtttccccatctgcttggaatgacgcccactggtgcaatgcactagtgaacgagtcaaccagcaaatcagtgcaacagtcctccaaactgcaccttcagtccagcaatgtgttcggggattgtcaaaatcgttgggtgcctttggaaatgaattttatgtggccgtgcttgtcagtgcgaggagaaacctactatgacaaacctgtggaccacacaatagacgacgtttcaaaatttttaagaccagttaatgattggtgcgtgttagttgattgtggctcgcttaactctatcatgcttgagcactgcaaggcgatctgcaaatctttagccaacctcggttgcaagatagttgtcgtggatagcccgaaatctcatgtgctaataagtcacgatagcgtgactgactacaattcagttgatagtaaggaatttcaagtcctaattcatcatggaggggtgggcagctgcgccactgcttatagtaaaaattggttctcggtagtattgcccggtatgtttgatcagccatgttgggccgctttgttgttgacggcgggattgggcacctttttgttgccagatgagcggaacctaacggtggatgagataattgtcaagacgcaacagttcccttcacagaaaatgctagtggccgccgcagagggccggacaccctcgagaagttggcaggaggctctcctcaacctaaagtttgaggcggatattgccaaaaatcctcagtctttgccttccaatatgaatcaaatgtatttgacggttccggaactgatagatcctgagtttgaggatggtccagaggaagtgtgggttttccattatggctccgatggagatcgatattggatgaaccaggtagtcaacgagttggtcacgaaaactactgacaaaatcatactgtttgagtgtctggacgggaggaccagctggctgggcagtttaattgatcacccaaacctgaaggttgaacgcttaaactttcggcaagaggatttaacggatttatattttgacaaagaaacttcgaaattgtttgagtacattgatagcacattggacagggtcaagaccatcgcagatagaattaaaggccgtggacgaccaaaaaaagtttatctaactgcctttgatcattccatgcacgcactcatagagaggtgtggcgtccagtacgtgacagtctgcacgacatatgtgtccaagcgatgggggtacaccgtccctaatatggaccctgtgttgtcaatctacttagatggggccatctcaaccgccatgggggtgtacataaacgagattctgcattgtgccggcttcccacacgattcaaattgtgttgagatttgggttatgaatcataagaaagaagagatccgagtgaactcaagaaaagttgtggtcaaagactatcctgatctgctcatggggatgaaggttcccaccaccgattcactcaaaggggttgttgcggtggatgaccgggtcgcccagagaatgacagataaggcaaagagttggctttctactaacatcggtaaggtggtgaccataggtagagcagtaacgaatgaagatggtacggtaggttacagccccatagatcttcgcaattgtctgctgtacattcatcatggttcaaacgtggccctcaaggtttgtgatgtgctcgggataccaaatatcacgtttccaatcacggaagaacaacgtcacaacggcatcattgctgagaaacagaacaagagtgtactcatgaacagcaagtctaatatggatcaaattattgctaaagttttcaactgtccaatggagcccctacatcctggtcaagacttcgattctcaacgctttactttggacttacataatattcagtttctgccctcgttgtcctcatatggcctcaacctgccaggtctttttacaggggttgctctggttcatagctttgaggtgcaggaccattccacgggagacgatgactgtgtaccagccaatctgctatcacaggtggctgatgccactagatctgagctgctgagtctactgactcaggggggagaagtgaatggggacctcgttttggatgcatgcattgttgcagaaatcaatacagtgatggtgagactaaatgcgcggagagaaatggtggcctctattagtaaggtggagcccagcgactggttcgtggtgttccaggttttggataatagttccggtggatgtcatatcttgcgagtcacgtcagttgagttggataccgtgaagccgcggaaagttggtccaccgctgcacgcccctgagccccgaatcaattatgggattaatgaggacgggcagagagccaacattacttctagtgcttatagaatcccaaattggttgctggcaacaagggggagccccagttctctcccagagaagcagttgcagcaaatcagttctatggtaaattctggcagctatgtggccaggatgtccagaatattcaatcaagtttgcgaggtaactttagcaggccagaaagatgtgtacagagtgacaacagacaacgtgtctagccttgtttctggtgcaatttacgtggcattacacatcgatggccggaagagtgctgtattgtgcgtgtggatggatagtaggttctacctttttggagggatagacacatcgaaattcacaggaaagatccagcgcacaggagtaaatttcaagccgccaaaaatagtggatggtgtagaaatgcccctagataaggtatcatctgctctcacccctctcaactccgtaacgaagaaatacatgctaaatcatccgacctatcacacattagtgtctatcagacctactgcgagactcgtggtcagtcattttgacaatcggaaacaccacatgtatgatgaaatcaaattcttgcaaaggtaccctaatgatatggtcatgtattcgaaaggaataccgaaaggtttgcatgagagatgggaagaattcaggggcccctgtcggctgacgtataaccatggactgaaggtggtgatagaagcgtatggtaagttgtgggagtcgctcatagaatttcaatcttacacactgtgggactataagatgatcagaatcggtaacagcttgcaatcagctgatctaggggctgtggttgaaagagagggtctcgaatccttgaaaactaaaatcacagaggtgaactcatttttcgagccgagagatgaggtgacatggcaattgaagcctaaaccaaaatccagagtcaagaacgccactaccggagtgatagagctggttgacgcaaaaattccagaggaatttgtattagataaggtcaaaatgcatttgatgtacaaggagaaattgcacatagttttggataaggcattgaaaggaccctcattgatcaaccggaccaccaccgatgtttatgtagtcaacactggcaagacttatggatcttctcttgcctctaaacccatgggcttctggcaattgagtccgtctgagatcagggccgatagttattccacaactgctagtatggattggtgggaagtgaagatggatgggggccctaaattccatgtgtcccaatcgcagccccaatttgctcaagccggtaagaaagagatgtcatcgtcttcttgggcattgcttaaaaatgtagatgctattaatcccctgtccactgggagtacccagagcggtgcgttctttgacagtggttctcatcaattcaggcagtttggaacgtttacagcccctttgataacggagatagacaatatggaggacaggatagatgatgatttgatgctggaaaatattaactactggttcgagaatgaaatgtacgagaataagaaaacggccccagcttccagtcgaataatagaacagcctagaaagataattactcgttcagattacaagtacaccatgactgaattgcctctgtgggccaggcccgtggttcagaaaaagctgaatgcaacatttgacaccatcactagaagactttacactgtcaccaagtttagaaagtttgagttgaacatcaatgctgagtgggaagctttcaaggtgtatttcaggtccaattatggggagctgttggaaaacttcaaagccaatgctctaattctgagtgctgatgacattcgagagtgggtggaatcgagaccggattgcaacagaatagccaatgagatggagcagctgctgacagacgcattcgtcacgaagaaaatgaatttcgtaaatgtgcacgacaaggtggaatcactcctcaaagataaagtagatgttaatttctacgatcagatgatcagggctattgtatggcagcctaagggcatagcgggtttattcagccctttgttcaagaaggtcaaagaacgcttgaaatcgttgctcgggcccaagtttttctatgcagatggtttaacgcctgtggatgtcaaccaactgctcatgactgtggaaggaggggacaatgtcgtagagaatgacttagaaaagcaagacaggcagacagaccataacactctcaagtttgaaatgaaggtgtacaaagagttaggtgtgccaccggagctggtggacttctggtacacttctcatgtgcaatggcgttggaaatccgagaatctctcaggaacattggacgccatgcgattgacgggccaagccactactgctcttggcaacgtgattgtcaatttgttgtgtcatagacgattagtctctcaacattaccatagaatccaggttatgttcgtgcttggagatgacaatttaatgataacaaaaggaagactgaatttaagccatttatcccgtgacatgaaacactattgcaacatgaagtgtactgtcagccaaaaaccaaggactggtgtattcttacgatatctcgtctataaagacctggatggttggcatttgagtcctgattttattcgtttgaagaacaggtatgaatgcatgaatggggtcagccacgctgatgataaagtgatcaaagcaaggaccatgtcctactgtagcgcgctcggtggcaacagagtaacagatggaatatgggagtcttgtgggggtgacgggaaacttttaaggtggtacagccagtgggatgcaatagtggcctgcgcagaccactatgacatatcagttaatgaagtaatggctgactataatcgcttgcttcatatgatgtccaacaggactgtattcgctcataaattttcatatttcaccacactcagatctaatgaatcgggccatcatttggggaatcccatgatacgtggcagcatagctgccaagagtttgtaa

SEQ ID NO: 1191 - DNA, 4807 bp, Althepos endorna-like virus 1
  source 1..4807: mol_type = other DNA
gttaccgcccggccagccaggcgatgacgcccccgcggatggggacgacctcgaactgggggccgaggccgttgccgagagaggcggcgcacattgcgctacccctcactcggcgacggactgtggccaagaagacgccgctgactccaaagggcgctcggagccagactcggcgactgggacccagccgttggtcgcggcggcggggtccggcgatagttcggagccacctggcaaatgccaaacgcatccgggtgcggtacatctgccaagtcccgtgcagcttgccggcgactcaccgagtgaggcggcgacccctgccggggttgacaaaccgccggcattaatcctcggggccactgctgccaacgtgctgcaggtcaacaacccacaaggccggagtcctgacctcggcaaaagtggcgatacgccaacagccgctgcggatgatcaagaagacactgaggcagcctgcaagaaccccattgtcaacctccccaccgagggggccacgacctctcacgcgatgagccctgcgaccgacttgccagtcgtggacacccccggcacgcccattaacccgcaaggcgggcctgcgaatgaggcaagcacgtgcggtaaattatcagtggttgattgggtggttaggtaccaggaggccactggcagtcgggcctgggttgaggtgaacctgaacataccggtgagttatacaaagctgactagcactttacgagtcactgtaggcgcgtcagttgacagcgatttcctaatgatcaatggtcgtcgcgtgtcagaacgggactttgacagcgtggttgaagccaaactgtccgtgttcattgtataccattacaccctgtcgagtcagtttggccctacacttaagaacgagcgcttgcttgcactcgatccaaactgcaagattgacatcagggacgtcacaaccataacacgtgattgttcggcagccgtcaccttgaccgttcttcaatatgacggcaccaccatgcggttaagcgatggttcggtgcatcaagcacttccgctcataatgccctggggtgcagccagaggcaagtcagccaagaatatggacctattgtggctgaatgacccaagtgatcaattgggcgacttcaagttgaacggtttcgatgttacgcaaaagaagccggaagaggcgctagtgacggagatggacgtttatggcgccatcgtgtgcaacaaggttgatgcagtattcttgacgatagttggcctgggttacaacgccttactacatccagaagtggcgcacaagcactatggtggagatttgctggcaaggggtaatcacatagctaaccgaccgaatgttgaggcacttaactacgacataatggcgggcgtggcagcgtggtggtcaatattgagtgaaggtaatgaagacgtacccgacacaatagccgaacaaagattaacggtaatgccagaccctaaaagcagtgtttcctttgagtatgagtcaagggtcgtcagtgcctataatgaagtcgaggtgcccaaggacgcgctgtgcgttgagtggtcaatgaagtacgcgtacccggacattgacggggagttacttaagcggttagctaagccagggacagaaaaccaagtgtatgccaccattctaacggagaaaataccgtgcgttatcatcaatgaacgcggcgacgtaacttttgcattgacgcggggacagccagtgccgcatttcgtgctgaggatgaccgtagtaaggccaaacccgcaagccggcccaggggccagtctaaaggccacccaaatgcacttggcacctattgaggcggtgggttactcgaggcagcgatgcgtcaggagcgggcacccagaggagcttagcataagcgccggatgtgctttcatgcgacgtggtatgagctgggatgacattgcccacggtttacaggaccggaccctgccggacgtgtgggtgcatgggctgacctcggcagcagagtggagttcaacgtaccataaaatgacgcggcagaaaaacccaatacaaggggtgatactaagtgtgcagggtcaactaattaggttgtgcagtgacgtgacattcagggccgggtcagtggtttggtataacacaacagacggcttggaaatggggatagtcgtagtgactgagccaggggtcaaacacatcattcggtctggttacgctgccataacctgtactatattgtatagaacaggcagcgtggtgccaaactggtatccaccagccgccagcatggagcacaccaggggcgctttgaacaacggcacgttgggggtgtgtgcaacccaccacgttcccgggttaagggtaaccaacgagtgcactgagctggtggtgggactttatgacaacaggtctcacgacaagtacgatgattatgacatactaagctcattcaggttccacgaaataacctatgtgccgacggcattaaccgttgatgagcacgaattcatgcttgaccgcggcattttggcaatgatgtatgactcagggcctgcctatttcatcaacaccagtgattctgagttcaatgcattgggccgcaggcattccttggacctagatgttgccggcgtgatttttagatttgaatacggcaattatcgaacgcgtgatcgattgacttgctctcagagaataacaatcaccaggttgttgagcgctgggtttgtaagcatgggtaccggttacgtctggaagtcacagttcaacccgatcatagattacacaaggaatggtgtccggtaccaagactacagagggagcctgcgatccgtgctgggcacgattaaatggagttggctacttgctgatcatgacatggaggaaggcaggttatacacagtttctggaccgcgaatgcttattaagctgggcccaggcggcccttttattggtttgcgtgaggtccacgaacttgtcaaccctgttagcgaagagctgtatgcggccggattgggttttaaaaatgcagcgggcagcaatgacctgacggcgttccatgctgaggatttcaagcgtaaattacttgaagtgaaagatgtaagtattgaccgaacggaattgctcaagacggccagcagggccattggatggcatgacagcggcgtcgatgcacgtgaagtgtgtatctttgacaacgttggctctgagtacgatggtgactcggaaatgctggtacggtgtgacggcaacaggtgggagttgcaactacacagtgcgccccatcacaacgacctaacgtgggatgacatgtgcaaatggcttaatttgacgggcttggacatcaaccagtatggaccagctacttatgtagcgcccttaaaagtcagggaagccgtgccactgtgggacaaaacccacaaatactcaatggtgcggttcccaagttacagtgtgccagctatgacaactacaagcactggacttttcaatgcaatcactggcagattggccaacacccaagtcctgaggacagtggaaccggacacgcagtatgaggtggagcaattcttacgcgtgatttgccgggacgatgcattacccataacccaggcgtacagagccaatccgatatctttcacacctgaaaagattgccaattgggtgagcaaacgcaagggggcagcggggatagcacaggacctgaacaatttgttgattgatgggctgatgaccagaccaatgaactcaacggaacactttgccaagctcgaagcgctgactaaagagttggcgccggacaccgaccttgcgagcatggtggacgtacaaactagggcaatagtattccaaccaaaagcactgtgtgcgatgttttctgaaatatggatagaggccaaagcaagactgaagaagttattaaaggagaacatcgtttattgtgacggactgacccctggagaagtgcggcgattagtcaagcagtttaaggccagcaacgccgttgaaaatgacttttccaagtttgacaaaacacaagaccacaaatgtatagacttcgaaatggccatagctgaactgttgggcgttcatccaggggtaattggactgtggaggctgtgccacgaaaaatggaagaccaggtcagccaggataacaggctactttgacgcgatgagattaactggacaagctacgactgcactggggaacttgataatcaacctgtacgcatccagagagctgattgagcaatgcggaagcggtaccattttggtgttagtattgggggacgactctttgatcctgtgcaggcatgaactggagttggaagagtacgctaagcggtgcgccaagaagtacaacataattgcgaaacctaaacagtcgactcgagtaggcaacttcctaagatacctgttcctgctgactaaagatgggattgaaatggttcctgacgtggtgaggtatttttacaggtaccaactgacgaaaggcacagccgatgtgtcggatgataatttaaaggcccgcgtgatgtcatactgctgcctgctggggaagaactcgcagactgaagctatatgggcagcaacgggggcaacaagtgagctgccgagttggtgtgaccagtctttgattatggaggccgcaagcgcttaccatggactacctagggagactgtagcgtcaatgtaccaaggcctattggacatgttacagcacccaacgccttatgaacatattattgagcattggaagaatgccaaatggacgggctccgtgttaaaggcaagcaggtga

SEQ ID NO: 1192 - DNA, 11616 bp, Arthrocladiella mougeotii alphaendornavirus
  source 1..11616: mol_type = other DNA
atggcaaagaagcaagcgaagcaacgacatcataaatttatacacagcggacactaccctaagggtagtgcccgcaatgaaattaaattacaaaccctcaacctataccattatgggctagagggggcaccatcaaatttcccaacgtttacgaagcgtcagtgccttaaaggggaaaatcaatacattgacacatatctatcagacatgaacgatgtggtcaataccaggaagttaggtataactggagtaatcgacatatatcacaataggaaaaagtacccagtagacacaccatacgacgcctggacatttaatggtaacacaagtcatttccgcaatggtaaatattggatcgacgattactatggtgacgtagaagacaagctgtcattcaccaactacagatgtgacctgttgaatgatatatacagctcaagtcatacgcacggtaccaaacgtaaatacgatctgataaattggttaacagacaagtcggtggcattcccttacggtaacatggcacaaaaacgtgacggtatgttagagttgctgcctgggtactatcttcggtgcagtcactgtgaatgcacaacatacttaccattgtcaaccatgttacctcacacattgactagacaacaaatcaccgatttcctacgtcaatttagggatgagaaggaatgttttatgcctgacgcagaaatttacggtgaaatggcaatgatgatacccatgtgtttcgcgacatcgagtggcgcatgcttcaattgtgacaacgacttgttttcagaggaactagaggtatgtgcagcactttactcggaatcagtggcgtattattctagaataagaggtactcagttggaagagatgctaaaattaaatatgttgcaaggtgcaccaccagatgacatgccgacagcagccaagcaatacaatgaattgcacaataggcaagcagcaaaagcgctcagcaaggtcaattcgttgtacattaattcattatacgccatgtcgcaaagacaacgcacagacatgatgatggagcgtagccatataagtatgtcgacagcatcaaggatcagcaacaccactctagaaccattcgaagcggaggaaatacttttggttgcagacctcgccagtatgtatgtggggcagttggtgcattaccctaccaacatcaacactcaagtatcacttagagatatatgtgccacaatatgtaatggtacttttttcaatgacttagaaatgcctataaaccctgccagaccacctgccacttatgtggaagttgtcaatggcacaatggatttagcaggtgttatagacaaaatgattgaaggcgcgtacttattaataccacgagaggtaaagagtgggttatacgagtatgtcgacaatgagtattattatagtgcaaccacgtgcagtaccgtgccagtccgatggactagggcaatattagacatgttccacgatttggcaacattagtgattgatggacaacactatcacgtgcacacggtaacaaacgggcagtacatgcaaattattaccatgaccccagcaagtgacccgtcacacataagaaccatgttgaattatgctgaatttgaagctttagtacctgtttatgacgtcgacaaccccttgtccacattaggtgtatttggaaccaaatgggaatacaaaacaataaatgtggaattgttgaggcggttagtcactttcgcaatcacagcagataagtcctcaagtgcaattgaagcgtacttcgcaggcataattagtacacattacacgataggtggaaaagttgttgacttgactaatacaccagtgactgaaggtttgccagagatactttatgccatgttgatactcagcaacaataaactagtaatgacatgggcatcaacgcttcacttgcacaactactctctacacagtggtgcaatcaacatcattgatttcttcataaatcgtatcgctaaatctttcatatctaaactagaggaaagcaatccatggttcgcaaaaatattgtcaagtcccactgagtttgccaggcaattgaaagatcacgcagagaagctgcaatttgacaccgtgttcaaaaacttaatgccgactatagcaatggataagcagcacacgttgggacacagtttgagctccaatgcaatagacaccccctcagcatgtacacatcactccctagaatgcacacacacaattggtcaactaaattgcgtgtgctgcggcatgcaatcacatacgccattgtgcgagtgctgtgcaaagagcagtgtatgcaggcatgcttgtagacacaaatgtactaataaggaacatttttgtgacaagtgcaaaagtaatgccaaatgctacaacagggcaatatgcaattgttgcggcgtgtatggatgcgtgccctgcacacattgccccgaggaacaacaaataataattaagggacctactaaagatattgcttccaaaatagtgcccattatcaccaacaatgcattgaaaataccgaagaaacatcaaatgcctgcgccaacaagttctacaataaaatttgagccatcaggcgttgatgcatgcatcaaaaagaccacaaatacctacacattcaagagtaagggtaagtcatacacattgttagcagatgctatgggtatcaaggacgtgaatgatattttgatatgtgttgacggctatttacacatcccaatgttagccttcacgggtatataccatgtgcccatagagttgactgacaaccctgtcagcgacccggtgcacaccacaaattattgtgcatacacttgtattgcaaatcagtcagagtacacaacggtgcaactgcaaaacatatttggtgaccgtccatctctggacaagattgagctaattgaactgctcaagagcttgcgcctcaattgtttgttgattaccaagaaagatgaagctgatataatacactatggtcagcaggcatctccttacatggtgatactacacggcagttgtgcacctggcgtcaatcacaaccactggtgtattggccacataccgaaattcactgagatgccgaccggttattattaccctcacagcttgggaccagcaccgcgggacttgggtaggtacaacatgtggaaggcaccagcagcagaagcagcggaactctcgaaactagtgcaagtaattagaaaacagaggcgaggcacagcacttgaatcgctgcttttgccaactgttatagacaggggtggcatatactggctgacaaactccaaggaacataacccgcgatttgggctcattaatattccactaccgccttccattgatcaggtgtttgtagatgcacttaatggtgtgtctgataagcaaattgacgcttcttatgccaacttcaccaatgaatggggcaatgtggaacaagatatcaataacgctattaagttacgctgtttagaaataaactatgcaatgagacaattggagcaaccaaccaacgatttgccattgtcaacggtggatataaaacatgacaacccaactatcgagctggttaacatgggacgcctaaagcccttggatgtggtaacactactacatgacgggaagaagagaaccgcagttgttttcggagaagcatcaaaccccatggtgcagaatcattttggaaagggtagtgtgctgcagatccataaagctagtctaagttctacatatagagctctgttgctggctataaaagcgttaggcaatttacccaatatctccagcatgaaagtagtacaggctgtagacggtattgcaggcagtggtaaatcaacaacgattcgcaatatggacaagaaaagtaacatggtactcgtgtgcaaaacgagatccgctataaatagtcactcaactgcaggtttccatgctagcataacatgtgaggcggcgggtatgattacggtgccaacattttctgtggttctggacgaggcttcgatgatcacaactgttgaacttgcggcacttattgatcaccctaatatgcaagtacatatgtttggcgattcaatgcaaatcggtgcaaaagatatgtcaccaataaaaggcatgcgtcaagagattagcttactgagccaattccaacacaagaaattgaaccacacccatcgctttggcaaccctcttgtatcgcacgtgcttaaaaactttaacaaagatataacttgtgacgatgacaaagtcacaacttatgaacaagtaagtgcaaacgactaccacactgttgcagaaatagcgcgcaaaaagaaagtagacgcaatatacactttcatgcatatagattacacaaatatggtgtcagaaattggtgatgaaataagtgtgaacaaagttcacagtgcgcaaggcaaagaatttgacactgtcatggtgttgcattggggtaacttcgcagcagaaggaacaatagttaaaagtgcaaactttatattcaccgccttaactcgcgcacgtaagcacgtagtttgggttttgccatcgagtgttcaactacgcttgaatgagatcgcagatataacttacgagggaagtggtggcacggataccaccttgagcgcgttcgacgtggagagttgtgcgcttactaggccattaacaaaagtggagatagagttattatcacgtgttatcacatccaacagaaattatgacccagcagtgtgtgtacaccacattacagccaactcaatacgtatacaagcacaattaaaatacttgggcgcaaaaatgaacgtagatttcaccgtggatcgtaagggtttccaccccaacaacacctgtaccacagctttcaagagcaccataaaagcaagaatagctcaggagtttgataccaactttaggcacataaacacaaacgttaacgaattgcaattagacaccaaggtgcccactttaaagaaatttaaactgacattcgctgaagcagcagcgacggacatgtacgagccgtcacgcatcaacgaagtgattgcccgcagtagggcaagtagtgtgcttagtgacaaggacgagtattacgacgcaatccagaatttcacacctgagtcgtactcccactccagtgttattaaatcactttacctgaataaggcaacgtggtcaaacattatagcgttggctgacgttgcattagcaacacaagcaactggtagtcggttacagaccatcatacgtaatgaaactgtatacatatcagtgtttggtggttgttcattgtattgcggtttcaagttcctattcccatccacttgcgttgttgttagctctgcgcacaacaccgaagggagggatgggtttctaaacacaattaactgtgccaacagacacatttgcggtattgaatacgatgttaatgctgtcttgcagtttatcaccaatagtaaaatatttgcagcagtgaatgattcattgtgtataaacagatggcaagagaggttcaataacatggttcagggcttatttgaatcatgcgatttcagcactgttggcacgcgacacaaagctagtaacttggaattggcacaaaactgtgccgattactgctcaagttgggttataccaactcaccaagcagtcagcatgtatttcgttaaagatcatgaccactacgctagccaaccaggtaataaaaaacttttcacgataggagaaatgatacaacacaacatgggaatacaaggtgatgctgcggttttcgacgttaacgcatcaaacaagaaaaagattgagaagatactaatccggcatatgaatgctgaagaaaagtttgacagaccaacatacgtgccccacatgatggttaagagtgcattgcactctgaatttgtacaacaagtgggaacaaatcatcttgtccctacggcagttggatgtgagacaacgtcaactttacacttagctatggttgtagcagctaacgtgttgaaacagatgcttgacgttgataaaatacaccacgttggtgttagcggccagttattctgcttgaatcatcacataggtgataccattagtcattatgcagataatgacacactgctgatcaaaaacatgatatcaggcaagttgaacgcactcatggaaaggcaagatgctcctattagccaggaggatcaagaatcgattaaaactaacatacaatactactctgatcccacaaatattatgtgtttcaacaaggatagcgtaagaatagtgcacccggcattaattagtgctaatatgctaggaaatgtgtacacttgtgtgccaatagcatgtgatgccactttgcatatggacagtaatggcacaatacatgaaattggcaagaacgggtcaacattcaaattggatatgggtcatatgcaagtggttgcgattattggtaactactacttgtgtaaggtagtatgcaaacctataaaagtgcaactagctggcattgatttacaattaaacaattttagggtgttcaaatcatcgctagacaataacaatacgataaaaatacctgacccgattttcagaagactcgttgcaagagcattcgcagagaaagatacttcgataaacgatatgatagcatacagcagatcattgctgaataccatgacgtataccagcaaaggatattcgtacaagtacacagataatccattggacttgttacagttctcaatagtggcactgaacttcgcgcagcgtaataggaaattgacatcattcatacaatcactacttggggctgaattgtctgaaggcagtggtaacaagatttcacagctattgtcaggagcgctcaagactatcggtctgaagctattgcaaggtcctatgaactccatcatcgaggctgtgcacgaaactattggagctataactaacaatgtgccaatagctaaggacatatactccatactaaaagatgtcaactacacagaaatacacccgaaaaagcaagtgatcattaagaaaacccataacgcacacgatgatcatgacggcgaaccatctgatgatgaaatgggtatagattggaatgatgcaggaaatcatatggagaaaggtggagtagatgagaaagcaaccccgagtgataatgaagttacacgagatcaaaaaggacaagaattgcagcgcgataagcagtctgctggccagcatggccagggcatggacaaaactgctgtagtgggaaagccggcggtcaacgcaaggaaatggcacgacatctttggtttaaacaagaactaccaaaatggtagtaagacaccagggaggcaagtgtgtttgctgtatgcaggtagtaggggggacaaccaaccattaaatgccattgcagaattgtgcgtaagtatgggtatgtcagtggtggcagtcgcacccaaggatatacatgaattggtcccaggagtggattatgagtactatattgacagttatgatgcattgacaattgcaggtgtgaaccagaaaatgccacaattatcaactatatctgagcacatgctagctgtttacagaacctggttcaagcatcacaaagcgcacgattacgtgttcagtatgttctttgcagatgaggcagacatggtgcacgccaacgttaaaaactttagggtaataccgcaattaagtgagacgtgggatcctaaagacaaaattgcgagcacaggcaagtggtctattgtgcgtaaaatgttgggaatacagaaaccgcttgtacagccggtttggtcagtgccatcagcatggcacatggatgatactaacctaggttacttattcactaagatgcaattgagcgtggacaaggcaacagatatggcattacgtttctgtgccaaccatgataacgatgtcacagtcgtgacactggggcccatggtgccagataattatcaggcaacaatcaagaatatgctagacacgactaacaacgctgtcatatttgtgactgcaaaactgcacgtattgcaaaatcaatttgaatttgaaggcaaacattacaggtactgtgattttgcaatgcaccaaagaattttgataataccaaagtgcaattatttattactaaagggcaagatcactcaagcaaaacatcacttcggcgctggtacttacgcaactttcagcttaattggtgtcaaacaagtagcatatccacaagcgtttgaccaaaaattcaacgctaagcattactccattcaccgggagtactatgactacagtccagtgaaagaatacaataggtcggcaaaaatattgtctaaattacttgatcaaaaaccaccaggaaccgatatagagatgttagactattccacactaacaatgccagttgcaccagtaaatacaactgatgaaataaccgctcaacaagtcatggtccgtgggctacggccaatagtgaacaattaccgcactaattgtgtatttaacgttctgtttgactgcctgacagataactcaaaattgtgcacaatggttgaaagttttatgacagtatggacctttcatacagttcaagatgttgtcgcactcctgatgataatacccacaaacgcaataatagtgggtcccgaattcagtgttaagttaagtagaaaaggagtgaatgacatggtttttatacagataaatacatcccttacccacgccaacacgtttgagatggacagtgttgaggcagtatcaatgcaagttggtgccagttaccatcacactatgctgtcaggagaggtagagacagataacgcattcctgctaacaaaactgtcggagtatgcagcagtggcattgcaaaacgacatcgacaacatggtcaagactacaatgaggaaatcaatgccaatccactcaatagaatctgtgaattatgcaggtggcagcaagatcaaagagagattggcagtgggatacaaatacctatgcattgggagtaaaggggcatattacgctatatctactagtgcggtcgatggatcggtgcatttggtacatttgcaacatgacacgtatgattgcgtcgtagcgataagactgataaaagaataccatgacacaatagcaacgtccaaaggtagaataaaaaatacaaagatagtggcaataaatcatgccacaaggaagaaattatacacacgaggtgtctgcgtaggcaatgtaggggttgttggtgcggataaattatacatatacgacacgtggtcaagattacatcaccatgaaatggaaaaacaagtaatagctgaggcaaaggagatacaattagtgccagaaagcaacgacgtgccaatggtcagattgcacaacatcaaatcaattttgcttagcgataaatacccggtgtgtgtaaataaaggcgctttatttttcagattggaaacggaaaatgatgctacatcaagggtgtgtggcgacttgatgcatgcgaggcaattgactaaggatttgttcatactgccttacaatggcaagcttgcacccttgatcggcaacgcattcatatacgacggtacaaaagttgcatacgctaacatcaaagatgtggaaatacctaaagatttgcacgctatgttgtcactaagtcaagtagatacaccgagcgtgtttagtttatgtgagcgcatggcactacagaatggttacatgagtctgagtgattgcccaatagagatgacaaggaaaaagcttacactggaggaattatcattaactcttaggcgcaagatgagtgtatttggtgacgtattcgttattagtgtgaactcatgggctttccaaattgtacgcaaaggaagtggattcatatatgctgatgaacaagtaacacttgacataccagattcaaaattcaacgtgtcaaaatataacactgtgtcagcggcggcacatacaaccggtatagcaaatgacatgtcatcgttgttaccattggacgtgccactacacgcacccccactagatgtagattgcatatcataccacgcaaaagagaaccaattgatactagtggccaacgtcgaggacctgtccacgccggtggatgtcatgcgatacgatgacatacctcaatctaacgtgatagattactgggaaaacaacgagttgttagacagcaatgtaatattgccaaccaacaaaaacttccgagtaactagtagaatacagccaataagagtcaaaaggaatttttatttaactatggaagactatcccaaatttgctcggccatccaggagtaaagcctatgcagaagaactaaatagtataaccaacagacatggtgcatataaggtgcacagaacggtaaatttggacaccaggcaggaagtagaaatgttttgcgcgaactactttagacaaggagctgggaccatattggaacaatataggtcagaacctgttgagttcaacgctgcaaggtgtcaagcatggatagacaagcacaacatgccaatgtctgtgaaaagggacattagagagatgctagagtttggttgggaacggaaaccaatcaatgcaatggaagtacacgggaagacggaacaaaccaccaagttcaaaacaactagatggttcaatgaagtagccacgcgtagtattgtagcagcaccctatgctgtgtcagcactgtttgcggaagtcttcatggaaatgaaacagaggtttaaatcagtgttgaggcatgaagtgttttactcagatggtagtacaccatcagaacttgccgctttaataagacaatgtggcgactttcaatactgtaccgaagacgacctgacacaacaggatggtcaaaccgacaaacaaataattgcaattgaaatggaaatttacaagatgttgggattgagtggtaatgtattggcattctacagacaatgtcatgacaactggaaatggaaaggtcatggtatatcaggcgtatgggatgccatgcgactaagtggtcaagtaacaacggcactcggtaatgccataactaatttgatagtccacaacagatttatgctacgcaacaaaaactcaatacgaaaagttttgttcttaggtgatgatattatatttttatccaatgtaaatcttaaagttgctaatcatggtacagagaccaaagaattgtataacatggtcagcaaggtgagtgctcgcccatacgtaggtggcttcatatctatgattgtgtacaacattagtggtaaatcagggatatgcccagattacaaacgcatgcgccacagatactcagtgtgcaattacacatacccagtggatgagaccaaaccaaaggtagcgagcaggacactgtcgtacctgttcatgttagggaaaaatgaatggacgcagcagctatcagagaagatgggctataatttgaccctgccacagtggtaccaccaggatacagcaatcgcagccaattgtgagtaccatggtgaaacagagtgggaaacaagggcacatatatcggccctcagaaacatgatggaaaagcaactagcacacagaaagcagataatgacttggagtgctatataa

SEQ ID NO: 1193 - DNA, 13185 bp, Bolbocoleon piliferum endorna-like virus
  source 1..13185: mol_type = other DNA
aaaatggcgaaacacaacaacaaaacaaggaaagatcctaaaataatcgaacaacgagccgaacgagaggcggctcgtaaagaagaatggatgtgtgataaaggctggaaaggcttaactaagctagaacaaccagaaatcacacataccaataaatcgaaacttaaactacttagcaataaagaagtaggaaagaaagtttctacgcatttggatggagaacagctctcgtgccagacattgcgtaacagattcaaatcaatagctaagaaacaaggccccactagtaaaaggcctaacattccactaaccaaaccgcagctggtaagagtgatgaatgaacgtatcaagtgtggaggagaatttaatcacattgtgcccatttacagggccttcataccgtttctgactgatgacatcaataacgctggttggattaacatcaatcagatccttatatacctgctgcacagcgtagcaggggtggccgatcgtaagttgacccccgaacaatacgttacagcaagggctaacctggattgcatggatttacgtgcagataggccagttataatggctgaaatgtctggatttagacctgaagctgacgtattttacggagaagggcatgaaaatggctgcaaatgggtgaacaaattgatcacagacctcatgaagcgtcatggtggcttttctaagctccacatgctctcgtgtgagcgtgctgctattgccaatccctgtttgatggtcagcaaaaaccctgagaaaggtacaggtgacacatttatgactagcgcttcgactggcaaattgttccaatgcagacattgtggtggcatcaaccacataatggaagcgttcattgacccaagtgccccgaacatggctgaggataagcactgtggattttgctatggatcaatcgcttacgcgcctgaacaattgatagatgccatgccaccgatgtttggtttgcctgatgtttattttatggatgagcacatgggttcactactccatgagttgggagtcatgggaaaccttgacgctatatcagatagaatggatataactccagaaatcataagcgccgatttggcaaccataatgttaatcaaaaataagaataaccctaagcaacgtttagcttatgccggtgctacaaattgcaatgccattttatcaaacaacgtacactactgcaaggctagtggtgtttgcaccgtggacgccaacatccatcaagagaaattggaaatcatggattatgttctcaacagtgaaaatatcacttgcgcctcaagaaacgactggtcgtctaagatggacagcctactcaaatgtggtaggggtgatgttagctacgtcaagcatgacgataattccccggtaggactggtgaccattgataatttaaaatcaactagccatgtgcaaggtttggaccacatatacgtagtcagcccgtacgaaagtaacaaattgcgtaaccaaatagactgtgtgcacacacataaaactgacaagtcattgatattcgcaactcacggctgcagtgagactgttattgtgcccaaaactttgatgtatgaattgaatgaacacgattttgtgtcaatagatgggaagtttatgagccaaaagacaattgcccagactgataattataaagtgtataaattgagcctacacacaggtgtcatcccaagcatagtgtttcaagtccacacgctgcgtgataattggtcactgccggtacctacaatagcgcgggagaactacatctctggagctatgatggtaatcaagatcaagcacgtagaaatagatgtggagtttttggagcaattgtacgcttacaatgcatttggagagtactcaccgaaagtggttttggagtacgccaacaatttgtccaaacaaaaatatagcgtcaaaggaaaagtggtctcgtataggaacttgtctgcggtcgatgtcgttcagcacgccatggtcgcttgcatactccagaaatggaggatgggcaacgttatgaactcagctgatagtatgaccaaatatcagaaaaaacgcatattggacaaatcgatttctacagctaaagacatgctgattactggcctccttaagaagctgcgccaaattatgagcagaccagagttgcttgctattttagctaactttaacgtggccatggagagagccatgaatagcgaagaatggtaccagttttccgagtactggtccaacgggcgtgggaaaaggacatgtgttgccaacaccacttcattcgtgtggcctggtgttgtgctgactgatgatgaccaacttgatcccgagccccagatgacgcacggcttaccagaagacatagaatacaaattcaaagaatttaaggctgcacaacgtggcaggcccaaagctacgccatcgccaccgacagccgggccgaacaaagagtcaaccactctggccaccaagcatgctaaggccgtcaatttgactgacacgacgactgtagacccaacgagcccagacattgtcgacgtcagttatgcagctgccgtccgcgctgaggcgggttccgttaacacgactgttgcatttggccccatgtacgatacgatcctgtcatgcacactacctgagtacaggcaggttagtatgccgtctgaatccacaaaccacacactacgattggtgcagagttgtaagcaaaccgtcggtttaaacgctgacaaatatgaaatcaacgcaaccagggtagacataacaacaatcaattgtgggttccaatgtattatgtttaacaccatcaggacctacaacatatatacgttaatgcaagccactagcaaaacccatgattttgcgctcgacgatatgattaacctgtgcatcaacgttaacctaaactgctttatagaggttgacggcacggctatactggtgactgcagatgaattttcggctgagtaccattgcattcggtttgtgatgcatgaagacgaaggccactgggccccttgtgacgtcacattgaccgacggggtcacgtccatcccattccacaattcacaacacaactcagagtacaaattagccttcctgcgatccaacaacgtcatgaacagcacagcctattggaacctcgacaaagacagcaggcgtaagttggaggtggaaatgatgttgtgtgcacgcactgtgacccctgacgttagtgatgcgattttgaaggtcaaaacaacaaggcacaacggcaaagtgtggatgtttatgggcaaaacatttgacactgctacacataaatgccttgtcgatgacaaccggttaatggaattggcctggtttgacaaatcgttggctgagttggaggtactcggcgttacggatgtctataacaagaagaaactgaacgcctataacgctggcaacgaaatatttaactacggtaagttcatgttgtaccaaatggctttgtggagggatagtgcaacgactggcgtcatccacgatgtgttaaaccacaaggtgttctcatgcacgttaaacaaaattgcagacaaactgtacattatcccgccgcaatacaaaatcaaaactggggacatcctttcgatagaacacaagcatacatggctatgtaaagtggccaagccgaggggccgcacaacagtgattcatttagagtgtgacacggcatctgtcaaggtgagattgaagttaggtcaatcatatagcagcttggccatcgccgcgatgagcgcctttagccacattgcaccgccagggtccatggttaaagccatggacggatcccgtggtgtgattgcgccccctggttggggaaagacgacagacattatcagcaattatgaccccgctaatacaactatagtagtcaagaaccacgcggcccgtgacgccctgagtaaggcgctgaataaacccgtattgagtgtagagcgagcaacaatatcaaaaatcaccacgcccacattgatcattgacgaagcttccttagtgtccgacatagaattgtatactatgctgaccactgacgtgacggagatcatcatgtatggtgattcttaccaaatcaagcacagtgacatgtcaaccatgcctggagtcaggcacgtagacaatgctctcaaccaatgtagtaatgttaccagacacaaaggcacaagacgcattggtgcacctctgatcaacgaattacaaagggcagatgataggatgtacatgttggaagacggcaaccccgttacagattacgacgtggtcttctcacagtcgataaacaaccttcacgtaatccagacgattaaagacaaaaacatcaattttttgatggctgtgtatgcccagaccatcaccattgtttcacacatgttggacgaagccaaactgccgtactcaagagttagctccgacacactgtacataggcacagtccatgcaaatcaaggattgcaattcgagaatgtcatggtcatacaacatggtcccatgacgtcgtcacggctgcacatggataagagttattgcatggttgccgcaaccaggggtaaatcctatttgcattggtacgccattgacatgccaggttgcgaatcgctaagtgattgtctgactaacactgcctccgccaagggtaatgttagtagccccccccatgtaccagtggtggattgggcgagagacatgtgtaaatcattacctttttcatctgtcaacacattgcaagccgagtcagcatcaataaaacaaccgaaggaatgggacactttgggtataagcactgcaggtattaaagtgtccaacggccacatggtgctaaatcccgaccaactggcgacactttctaaatgccattattacttaaagcgttctgtgtgcaaaaccgccatcataaaggctatgctgtcggcacatggaggtcgtgttcatgaagacgatcattgggttacatgcaagtttggcgttatgatgtttggctgcaaaataatgatccacaaaaccttatggacaatgcatgtttccggaatgtttcaaaaacaggtaagaaacgacattgcagccataacgattcaaatcgacaaaccaacaactaaagagtatgaattgaataatattgcctttttagacctgcatgagttaaatcacgagttggtggctgttttagggttggtggcggacaatgaaggtctgtgtttcaacgagtgtgcattggcggctggaatgcccgtaatggtcgatgaaacccttgtacatgtcaagaaaacgcgcggatgttcagtgtgtgctgggttcactgtagcattgggcaaatcagtgatcctggaagtcgacgcaggttacaaatcttggtacggtagatgggttgcttacgattgccataacagtaggagtctttggatttacaactgcttaactagccggcagcccatgatgaggaccccagccaacatgcaaaatattctgctcatggaacgattgtttgccgcatatagttccacatggttggcggggagccctggcatcataaacttatgcccattcgaaagcctgaacaatgtctggcgtgacagactgttattgacaaacaacatacaggttgatcgggtgagattgaacaacaaccatgtacaaattgggtcaaggatattcacaggaaccaaggacggtgttagacacgtgttctactgcaacaacgacgatgtgatgatgcaggcggaaatagcgaacacagaccagattttatggcttgtggacagaatgacaatggaccagaattacaagaagataactagcatactagatccatccaacctacccttaggtggttttgcgggcacgattgtgcctctggacaagcacatagaaaacaacaccgccgttgctcgagtattgttggaagaaaagcgcaaaatagacaacatttccattcagtcgcgacatgtcatcaccgttccaaacgctgattacgagttctacaaatcgttcatatcacaatactttggtaacgcgaacgttgtcccaggcatgtcaaatggtcgaatcggttttgtgggtgtggtggattgcattaacctgcagacgtacatggatgctcaaacagtgcaagttgtaagtcaaaccccacttttgcctgttgtgcttaacgcttgggacgtgtttgcaacgtgcttgcccatgcacatgtcggcaactgactggcgttcgcaacacgatgcattgagccaaatttgctccagtacgttactaccaatatatcagacacaattagcacaaagccaggcagccaaccgttcgactgaaacaatcaacggtataaagtctgtgctggacaagataagcaagcacgttgattctgggcattattggagcagtgcagacggattgaggatgatctctaaacctggcataatctatgcatcagtatacatgttgtcaacaccgatactagatacgctcgccaaaacttacccaacaagggatataatgggctgggtggtagacccaactaatttggaatctggattgagttacgcaagcccaacctcaattgcgttccacggcggggactcattccaatggtcaaaagaacatttagaagatatattggagaatagacccatcattctgaatggtaacgtgtaccgcccgttagtgcaaagccgggtggggccaattgccaacatctgtctaaagcaccttggtaaagtcacattgcaaccgtacattagtgcggattcgcgatacatggaaagtcaatgtgtagctgtacgcttccccaacattaacagtgattggtacacaatgtttaacaacggtaaaattgacatccaagaatacctgctggacagtaaaatatttaacatgttgacaaaacgtgctctgatgtcggataccaccatatatgaattaatcaactacatacgccaaagccatttggcgtacttctacacatcacgtggcagtaacaagaagttaaaaaccacatggcacacacttgtagtgactgcaatggccgcactcatccatgcgaatcagcttaaaatgaattacacgaccatgctcggcatgattactgacgctgatgggcgttcctcctccaaccacgcgcgcatgatgtttggcttccttaactacctggcaaaaagcacacccactaacgcagacgactttttgaacaacctgcccaccaatgtggtcagctttttattacccgaggagaagatgacgcaattgattatggagcgattcgattacatgatgaacgccatgaaattcgagataaaatcaaaccccataaagctgatcaaacataatggcaaaactagctcggtgctccaactagcagaccctggtaaccaagggaggaaccaagccatcgcattaggcaggggcctgcgcacggttgttggtgctgtgcgatttagtgtgacccacaccagtgctcctggatacattgaacctcacataggtactactactgtgccgccacacgcccagcattcaaccgcaaaaccaagcgataaggtcccgttagccgaaacagccgattcaagaatggtgcccctcaacgagatcgacacgatcccgaagcattggatttctgaacctgttgccaccattgaaggaccaaaaatattgtatgctataacagccatgacgccatcttatgcctgcccacaaccgagttccagagcttattacaatgctaagcggaacataaagctggtgacggatttggtggatacagagttagggcaaacgcgcattgatttgcaatctgctgaagattggagtgtgcactcaacaatgctgaacggcctatctagcacgcttcaaacagtgtctagagctagaacttttgggtgtccttgccacatcgagcgtttaccatttgaagggtttaaggctggcaatgggatgtgctccatgttcggccccggcggagcattacggactgatgcaacaccatatgatatgaccatgttggtgatcatgatgggctcaaggggcgatgccgaagcgtggtacagacttgccaatttgacgcctggtgtcaattaccactttgtagttgataaacattatgttggacccaccctgagcaacgtccaatacgtgcaagtggactcctcacaatcgcatgcagagtatacagctgtcagaagcccattggagctgattaatcaggcgggcttaactcacatagggaaatcgatggaaaaaatgggagcgtacatcatggcagtgctagacttaataagtgacggttcaggcaaattcgactgggtattttcgtcagaagctttccctttcttggaagaggtggcccaccggttggatgccaaggcaggggcttatgttgctacagcaaatgtagagagtgacggattaccttgttgtttcatataccaagataattatcctatgtctgtgactccagtatcccacaccaattcccacaagctgttcagacagttggtgtcgtctgctagtgaacacttgtcatccgcgttaggagtgcagacatgtgacccattgagtgtggccagtgttattattgacatgtcggcacttggaccttaccctggttctatttacaatggaaaaatgactaggttgggctcactagattgtgacactactccggagactgaagcgttgagccgatttatcactgcaattaaggaggacatacttataatcgccttaggggcattattattgcgtgaccattttacagtgatcaagaggctgattgacaagtattcgcaaggtgggttcaaagtcgtggtcattaatgtggaagtctggaagacgaaaccctccactgtcggcatgcaaataccgagttgggtgtatgacatcaggccatgggatgaaacccgcgcggacgacatcgtctcattcaaaaacatacggtacgagaaaatcaaaggagaccctaagtgtgtgtttgtgtgtcatggtggtagtggcagtcttgcttcatgcgtcgctaataattgcgtgccactagtagtcccacaacttgcagaccaaccatttaatgcaattcagttgcggcactgcttgttaacggaacacgatccagtgcctaaccacactcaattgctagctctccaggccttattgctgcatagcctgcgattttcgccgactaggcaagccatggtggacaacttgttgcgcttattgcagggcgtttcatttaaaatgtacaacgtgaccgaatgccttgctggcattaaaccgcacatgtcgattaccgatttcgacgcgatggtagctaattacgagagggggttagaaccaaccatgttgcacaccgagggcggttcaacgagtgacgatgatgaatcagatgccccagtatacattgcacgtacacctgaaccaagtgttgacgatggtagcgaatctgacggtgaaagcagcaacagcgaaattgatgaaaatatagcctccacatcagcactaacaaccgcggaggtcgctagaagggaaagacaacgccaaaaagacaaaaaatgggcattatccagtcacgcaataatgtttaccccgaaaccacaaagcaccggggacctagttggcatctcagctgacgggacagcagacgaagtggtggaaaggcccctaattaacgatggtttgctaccacacaatgtggccattgacttaccagaggtcttatgcaatttaaagcgcaggccagcattggtgagaggaacatgtgttgacccaactgtaatgtacaacgagtatacaaatcgatggtgcgtgaagaaagctctcgcgcagcatgtgaacggtttgagtgacaacacgaggcttaagaggatgatcgaatgcattgatgcgccgctgctcaccagcaaggagtgcataaacatcagttggatgttgggcctgaatatcaacgtgcaagttggtgacgaactatacggcacatcggatgtgaacgaaactattttgaccaagttcaaacagggttccacgattggacatgccatgcttggtacgtcttcgatggttggcgacaagcagccttacatgtccataccctaccaaatgaacgttgagcctaggagcacgacgattaaagggaaggttattgactacaaaggtgccaaacatagctttggaaagttgatagccgacctgggcgggcgtacccacgtgtcgtttaaagatgtgttagcaagatgcacagaaccaaacctcgccgccatggcggacagagcacagcttaaatacatcccgataacgccaattagaatgcaacactatgggtatgtgtggcagtctataggcgagccgactatatatcaatgcttgttggcagtaggtgaagcaacatacagtgttgtggtgtacgacgatggagcgtacagctggcccttaaactttgatctattacccacgtgcatgtgtgttatcttgactaggaaatcgatttttatggcagaaaaacgcaccataataactgatgatgtcaaacatttgtgtttaaacaaggcaacctatttgcatttagttgcaaaagaacccgcaatcaactgggcttacctgcacgatcatactaatgagttgggcttggttcatgtgtggttctttgacaacagatcacatcacatgttcgatgaacgtaacaccttaagcaggttggtgcaagcgaacagagtgaggtttgtacctactgccacttctgaacaggtggatttactattaagaccacaatcaacagcctgtaaagtgtactggcacggtggattaaaaatggccccgttatgccctttgaagttattgacgagcattaaatcaagcgatgtggaactaaccccgagcggtgcttcatacgtgatgcaacaggcggtacaagtagaaaaattcttcaatgttgtaggtggggtttggaaacaaaagtcttggaaacttccggaagctaccgatgccataacggaagagtgggaccctacgtattatcttgattttcatgttgccgattttccgtgcattacagataaaaccatgctggagactattctgtatgacgtcgccggcggcaaagtggaagatgagttttatataagtttggtagaccaattttatgaaaaaatagaaggccatcatttaacttaccgcctagttgacgacgacagtattgactcagtgtgggtgggacggttgcaaacaaggctccacgtggaggacgatgagttctgggtgatgaatgctaaggtgatttttatgatagcaaaagctgtagtaggcaatgtgcgagattacggttcccgcaacacacagatgactagtgtcaaatttgacccaacaaagccacctggaccctctgatgaaagaaacgtcacttaccaattaggaaatgctgtcttctctgcaactacggagccaggcacgaccatggataagttccaggtggtgcgcgcgacgcagataagcactttggaatctttatccatgcggccctacgacatcgaagccatttgttgtttttctgatgttggttatggcaatgagttggttgtcactgaaaaggaaacgttggaaataaacgacaatgacaaaactgttaccctaaatatggagtgcatggacaaagatgtgaggccagactctttggcgtatttttcaggatgtgaagtggagacggctgtgcggtacgggccaacagccaacgttagtatggaatcaagtgaactctatggaatgcctggagtcatctcaaagccattgatggcaaaaatgccaaataggggtaggcctgtgatgcctgaaatggccaaccaagagtttaactcggtatcgcagaggcagggagacgtcaagcactacaggaagaaaaaccttgacaagcgcaaagtatggaacaccatgtgccaagcatactttaggcctgattggagggaacacatccagcactacgccgataaccctataggaatcagtgataatgcaactaaggaatggttggccaaacggcgtgacggcttggccgtcgagaaggaattgagagctacattgcaggaggggatgtccatgcatcccatgaattcaatcaatgttcacgagaagcaggaggccctagtcaagcctgatccaataagttcattagcagagcaaaaaactaggtcaatattgtggcaagacaaaggcatatgttccataatttcaccaataatgatggaagccaagcaaaggcttaaaaacctgctcggtgcacatgtgatatacacggacggcatgaccccccaggaaatcaacgactggttgctagccaaaggagttccagacaatgaagactgtcttttggagaacgacgccacaaggcaagatgctcaaaccgaccacgaaatacttgacttcgaattcttggtgtatgaaatgttgggcgttgatccaagcgtattaagtttatggcgcgaaacacacaactgttggaagtttaaaggcaactggtgccgcggcattatggacggcatgcgattgacggggcaagctacgacagcattgggtaacgtgatagtcaacttggcaatgaattcagcgctggtgaggcgtcatttagcatcactcagatttgtgatggttttaggggacgacaacgtgatatgtttgaaggcacgtatagatgttgaagcagtcaaaaattatagcatgtgctactggaacatggtaaccaaacccaaatttaacaggttagcctgtgaatactgtggcatgtgcgtgtacatcggggacaataactatggactttgccccaactacgaaaggatcttatgcaaattagaggttcctaatggcgttggcagaataacggatgagaaggtcaccaccaggattctgagttatttgcatttagtgggtagtgttcctcaagctcaagttatagcaaacaatattgttgatataaacataccaaaatggtacgattatcaagcatcgctgtggtgcaatgcagagttacataaaacatctcaagtggaggtgttgtcgaccgtgcacagaatattggaaatggcttccaaaccaaagctgtacacatttaaagtgtcagtgccaaagaaatgggatccgaggtggaggagcccacatggagtatacccagacaacataaaaatagctatgtag

SEQ ID NO: 1194 - DNA, 13506 bp, Botrytis cinerea endornavirus 2
  source 1..13506: mol_type = other DNA
atgtctaactacaccaaatccaacgccaacaccatgaaccaatcaccacgaaacaaaataacaaacatcattgattctgttgctctcgaggctaacaacagaatcatgactctcgaaaaagcctcgaaaaacaaacaaaaacaacaaacaaaatcacaaggaactgatgaaatggaggtcagctctcttggtaatagatctttaacccataccactggccacttgacaccacgagcctctaactccaacagcatcgacagtaacagcgtcaaccacaaccgctacaaggggccttttgctactttagctatggatgaaccactgccaagtgaccgggtagagcgtgagacagcaaccgatttcgctgacatcggattgtcgtcgggtaattctgacaaagcaaatgctctgcagattcaaattcccagcagcaagagcgagttcaatgaagcacccaccactttcacagagatgggtttcccaaatcaagatactactgaaccttggtatgtcaagatgctatccacattccgctccagtgacacaaatgctgaccactacaagtcattacacggggtatcgcccgcaagtcagactgttgtgccatggaagagaacagacgtgccaaaacctattgaagatgtccttgataacagtaaaacccctgacacacccactcttaattctgcgcgcaaatcatgtctgtgggtagccatgcacacgcttaaccctaggggtatggaacaaataccaatcaacataagcaatcttaagtacttagactaccaaaaatacaaagtctggcgagcaggtgtgacaaaaggttggttagctatagagataagacgtgaccactccaagaaccatctgcactgcctttccggcaatcacaaggaacaactattatcaggtgatggtaaattaacgggtgtgatccactggacaaagatgtttactgagattaacaatgaatctcagctgtcatggggccaattaaactggagcaacccagatgcaggtctgattaacttttaccataccttatttcgtagcacaaatccctcaatatcaactagtctgtacatacattgtgagaaatccactatgcgagaactcatagactaccagtatcctgggtttaagcaacttggtaagacatttgcattgcctgaatccttcccgacccccatgccactaggtgtcctaattgagcacttcaaactcaagattaatctgaagaaaggcttacaactcacatctatattgcgtaatgccaaacaccattacacacttaccctgattgaccagagcaacattgagctacgcaaggtacctgcaacgtttgatgactcttcccatctaagtttcagggcactcgaaactatactgtcaacaatttactctatgtctcaagataggcagttagctatgaacaatcacaagcatcaaaaaatcttgcctaaacctatggtaggtggtaaaggagactgctggcaacaaattaccatgttttacgcttacacagaattatggtttggacgcacagatcgcagcgatgctatgcccatggaagaactttatgagataatcaagaagaaagcacttgtcgagtaccccatgttcaggtttacacatgagggagacaacatgtatcacgtagagtatgttggtttggataggacccataaaccatcctataaagaaatgtggacagaagaagaatatgcagaaatcatggctgaagtaaaagtcaaatacgcagggtgttacagattaccagatttggccattgaatttaagcgaataattgaccaaaaacaggctgaacacatgtcggttgaaattgacctagcttttgagtgtacagcttatatcgacaaaatgtatgatctctttgtacgtgatgattatataactactgaagaaattgatagtgatgtagacaatttcttcaatgcagttgaagctgtattgacgcaatatgagggtgacaacgtattattggttggtgcaaaggccactgtactagaaaagctagcgcatgatctgaacgtgcctctaagcatgcttgatagtggagcagtacgagcacaactagcatctactatagcttcaatgtctgatatagcagtgaaaccacgtgacacaagagtagagcaattacctaatgacacgagtgacctagttatcgaccagttaagccgagactatggtaactttaagtttattcggggctcgagcggcagtcacccgcatccataccacaacgccgccaggcatgtcatcacccggtacatagtctctctttttcccaagtcagatctgttatatgacataggtggcaacatgttatatcatgtacaaaacggcgattggcatgttcactctgtgtttaaagctgaatcttacgaagataaatcacgttacttaacctacactactgctgtcgtgaaacatattagtgtaagaaaatcacagactaatattactggggctactaactcagtcacccaaagcatgttgtcaaaggtgttaacagctgataacaaattatggtgtaacagcgcgtggggtgattgtcaacatgggaccaaaaatcacgcaactttcgccatgtccgttgacacacttttcaacattgagccatctgagctgttgaaaggttatattgcccacaaagtaattatggcaaaacacgctttgactgtgcccaaagcatggcatatggctgactctggaacgctaatgttcgatgaaggatactggtcaaaatcagacggcaaccttaatgtggtattcccaggtgagtcaatgacctaccaaaatagcattagtttaattgatacgtatataaagcgcccattaatcatgggagatagtcatgctatctattgcagagttaatggatataaagggccacacctaatgatagaccattttgtgttaccacgtactctagtcattgaacaattcatgaaacacactatctggtcaaaccctgacacaaacaccatcgtagtagttgtacctgttattgacatacatgcaccagtcactctattaaagcaacagccgtttaccatggaagccatggtgttgaacatacctttttatgaaaaattgatgaatagactgttacaaccacacacatgggaggggctcactcaatatgcagctggcttagttggccgaacttatggatcagccagtggcttcacacgccaatttgatattactaacagggatgttaagaatcattgtttagtagcctattggtctaataaccgttcacttgaatcaattcgccccttggtcaagcgagctgaggttgacgtacatcagccatctttcttacaacaactttggtcatcacttaaaactttcctaactgagttggggcgtcaatttgaccctacagagtctgattttatcaaaaaactagttagtgataattcagaagactcaatgcatctcggcttattactagacagtgcatttaaagctatagacagtgttaatgctagtactaggttggatgtgtcacattacataactaatggcatgatgtatgaaactggtgtcactgcaacatcaaagtgtgttaatattgatacgtggcgtcaaaaccatgttgaggtatcacacagtactgtgtacaccttgataaccggcaaggacgatatagcacctgtcacaattgtatcgtgcaaagtcgctactacatgtcagcataaccacaaagtagcccatgaacatgtggttggcaactcaattgatcaacgcgttgggatgtgcaactgctgtggcatacttagcactctaacagaccaaaatctatgtgcattgtgtggaagcacccgattgtgccatggcaaaagccatctgtgcaaacatgaacacacagtaattaacgatgagtgctgtggcaaactagcgtgcacttgtaagaagaattataaatgctcgtgttgccaaatgcctagctctttgccagtatgtgaaatgtgtcgtaatgccccaccacccaaaacagctgtgtgggacgcgggcattatcaagcaacctggcacgcaagcagaaaccaatacaactgaaccaacgcctgcttcaaatataaaccatccagacgtaacggacgatattagtgatagccactgtgatgatgaagcagtaaataatgtgccggttgggatgttaagtgacgcttccagacgctcgagcatagtaagtgctgttgtcgccaacgcgccgcgccacatgaattttggtgatcacccatcgataattccgttaaacaccaatataacagacagagcacaagtccaagagagcgccaactcaccagtagactatgatgatttcgtcaatgaaggctcaaaccactctgtaattagttttgagatacctgatgatacgtctactattaacgatagggttagttcagagcgacaattagatgaactgcgtaaattagtacccgtcaataatcagccaataaatgagtatggattcgcgggcttagaggctttgagtacggtgtacaatgccattcgcttcactgagagtgcttccactaaaccagttaccaaattggtactaccaccaaatttggttgccagacaaacaaccgttagtgctgtcgttatagcatacggtgaggcacgaggcgatggactatgtggcgcacatgccctcagccagctatgtgatagtgatgtagatactgtaaccacaattttggagagagtaactggcaaccatgactggtggtcagatgttgaacttgctaaggcagcagcagtcttacgtgttaacatactaatagcaacaccagctggatctattttatatatcaatgactctagcgtgcgccaatatgtcagtatttgcactttagttagcttgactggacaacgtcactgggtaccatgttcaagtatggttgaccagctgtacacgagcgacctacggaaccaatattacaattacatttttttagcgacctatgcaagcatgagccaagactcaactaagacagttgctgatgtactagaagcagtagaccgttttgagccgatcaacattgactcggctagtgttgtgtcttatcatgttgatcatgaatggtctaacataattgctaattacccaaacggtgttttcaccacgctaggctatgaacacacatctaagagcttttatggccaaccaatttcaaactatgttaccgagggcgagaatgggctagtaatggtatcagccccaacagggtttggtaaaactacgcgcatagcagagtttaatgatccgaagaaaaaccatgtagtaatatctccgagccgtgctacagtaatcagcgccacgacttactgtaatgatgtgcttaacatagcatcacaaggtcgcgctgactcaacctggcacccaaaaaacaaaaatgactcaacactcagtagtgcgaaagtagtttacctgacggtagactctgcttacatggcattatgtagtggcaaacctaatgctacttggttaaaaatgttgtctggacggtgcatttggcttgacgaggtacatgatttaacaccaaaatatgtctgtttagctaaggcattaggttcgcttgttaccggtgtgttgtctgcgacactgcctaatgtgccacctgttacagacacgctacatcctatacgaactatattcgctgctcctgaccaactagacaatgacttcaatgattttattgagcgcgggccagagaaagggtcattttgggtggttccaagttccacacaaacagctgtaatgccggctgaacgcgtcacccaagcagccagtagtggtgtaaagtttgccagcgttacatccaagacattagctaatctagaactagcgactataaattcggccatatgtacaaactgtatcactactggatctacgctaccaggcttagagaacatgcatgacttaggatatagaattacgcccgaactcatattcccaccatacaaagccgaaatcaagggggttagcaagatgcgattgtttaactataagcgactacagtatgatatgacacagttgacacaatcaagaggccgcgcaggtagaacgagtgtggggtacgcggccatgtcgctgccagctgcggcaaacactccagctatacacgttgaactactatatagcttgatggtcggcatcccagcaaacacaagatgtaaagacctgtacgacaacttgaaaacaaacaaggtggattttgaagccattaagcgtgagcgcgatatcgcagtgcaacgaggttatgatttccagaatgaacaatgggatgtgttagattcatggatagaaactgtgagtgaattgtatctgcacttaaaaaacaagatagctttcaccgatggaatagttgacaacaatacaatatcagctgcattcatgtctgcactcaacactgacagcaaactacacattgataaagctgtcaaacgacgaatccagactaatatgcacaacaaactaattcactatcctaaattacataactgtgactgtgggttgttaacggtcttaggaaaacatggatgtggcaaccaactggtgttacccaaacctgaggccgagtggtttaatatgacaatggagcagtcgtatgctaatgggagtttcagccaccccaagtcaatcctcgcgattgacacgtctccttcagctcgtagtgtaaacttatcaactaagttgtcacaacagtttatgtctctgtacttcaagatgctgaacaccatactacattcagctaaacatgcaacaagcagtaacgtcccaactaacataacccatggtgtcttgtttgaaagtattactagcaacaaacacgccaatatttctgaattgaaacatccacataaattgaacaatggctcagtgttaggagtgtttgacaacaacacaagagaactgcgcttagagtgcgtggttggcacgaccatcgactgctcagtcacatcaccccaagccatagtaatcttaccagtacatacagcaaactatgcgttaggtatggcactagctagcttgaccatgaatatcacactcaacacagcaatagcagttgccacgcgctcaacaatcattgttggcccgcctggctctggtaagactcgtgaattgcataggttgttcgatagtgacaaacacactaaaaggatagtatcaaaacagactggacaaatatctgaattcaaaaacttaaccgtgccgccaacagctgctatatttgcagataatgttgaaacactatacgttgatgagtttggtttaatgacagcgtctgacattttactgttgtctaccaagtgcaatgtgatggtattatcgggcgacataaaccagaaagtagctgacgatactgacctagacacgtcaaccacactagacctgtcttggtttaggaacaatgtgggatctacgaccgtgttcaatgagtcttggcgcttcgggtctcgaacggcttctgttctgaattactttggcacgcttggcccatgtcacaacgagaatgacaaaggtattggtatggtgcagtttaattggcttacaaagaagaacatcaacaccataataattgaacatgacatacaattaatcataactcattctaatgctttagtaatgcagataaagcaaatattaggcacaaatagtaacattaactgcatgacaactggtcgtgcacagggcagccaagaaaagcgcgtattatatgtagcttatggtaactcaagcgaaacgtacacagcggctgaattgtatgtagctctctcacggcacagtgaacactgtataatagcggcagactatacatttgaagccacagctaaaacatatgggtttaacaagcatatgcaagatgtagaatcaatgcgttatggagccatcactgggccaaaaattcgcgacttgagcgtgagttacatcatggaagcgtggtctaacatacgctttaattaccataagtttgctgagccaaagtataacaaggcatttgataattatcttggatactacaatgctttgtcacactgtgctgaatacttaaccagcgacgtgtctgataccaatggcttggatattagcatatctgcgtgcgtgatctacaacaagttgtaccgcggtgttgatgacagcgagttcacacaacctttatcaccacaacaccttgaggtctacaacggtatgacaaacatattcaacacgtttggtccaggggtcacagtgcctgtagagagaacggctaaagtacttagtgaatatttgaggcctatcgccagtgtgagacagtattacattataccattctcaaccaatgtgaaactggtaggtaatgctaataacttcacttcatatgcgctttgcaatgtgctaacgggtgagattgtgatgacacaaactaacaatctgacattccaattgcctactgctaactctctccgggcgtttgttgagtccatgaaaaacaatgtcaactgggataaagatatgtgtgtgcagatgtcagtaagtgaaatactcttccagcgcttgaagaagagtattgttaagtcatatcaggatatggcaaacacatctgagtctgtgcataattacacgatcagtaacataccaacactctactcactgtcatgtcgtaaaatgtctaacttgcccaaatcgctaacattgtttgaaactatagctgatagtctacagaataactcaccatcgcccaatcaaatgataacaaaagtctacttggacgccgttaatcaactggtagaaggtgacacacctagaggctcaagtctaggctacacaacgttatcagaagagctcatatatgatgccctggtcggcgtacttcgtgagttctacgctcatgataatatagatttgtttatctcacaagtgtgtgacattactgcctcaagtttcgaggtcagcgaacctacaaataacacacatgtgctaactctaccaataaaacgtctacatcaaacagtcgagcatctccataagcacatccacaatgtagtaattatcgatgtgaaacagcggaagataatcgcaactcttgatataccacctagtactgagcactattggcatattgatgacttgtataaaaggacacacgcactattagtattggggctactggatgaccaaatcaacacctacaataactataagctaaacgatgttctctcaaacatcaagaaaacagcgactaaagcatttacggcccaggaacagtttttttctaagttgctcaagtatattaaaaatattatcaactcactaggaataaaggtacgcaaagggaaagaaatgttgaacatatgtggtttacagcagttgtttgcagcacggatgaaacaaccacacgaatacacgcaaagtgcagcgaaagcgttgtatgattcatattcattagcaaccaacacactgaaaaatcacgctatcaagggtttacaacacctagtgttaggccacgtctccaataattatgaaattgatatcaacaggcaattgcagagaacagtagcttccgcagtgagaatgacacatgacaatcgcgcaggtgatgatatctcaacatcttcattattacggttatattacagcttgaagttctatgcgcagggctatgagtcgggtgctgctaatatcatgtgttacgacgtgtttaatataggcaacgtgaaagtgactattaatgaatcattgccagtaatgttattgcgacggcttaatgatgatgcgcgtaatagtttaatgggagaggcaaatcgcaaacaatcagttaagtcaaagcgcacacaagccagcagttccaataagtgggatggacaaagcgttggcttgtccataaagcagatgtttgctgtagatagcagcaatgcgctagatgacgcgcctttcgatgaccttttgtacgaattaaagaccactctgtcggacagtgtatcggtcaccacattggaaaatgctaacagacatggaatggttaaacttaactcacttaagatggtccttgctatgtaccctagaataacaactaccatgttgactgtcaccaaagcttactatgaattatataaccatgtgtttacaccagtgctagaagtactacaaaacacaataggtacgggcctagttaaagtaaaaaacagtatcatacggttcctagagtatgatgctacaatggctgatgctaaattggaaatacaagatctacgtgactcattggatagtgtgcgtcaaagcccagtgcttacatcacttgatccgacgccaatcaacgacgatagtagcgaagctgagtcgtctatgtacgaagatgcaaatgatggaatcagtaacaagatagagccgtcaagcacagacaaaatacatgagaactcagtgttagccgaatatgtcaaacaacaactcatgtcaggtaatggttcaatagatgggtcactctttactacttgtgggagtgacgtcaaaaccaaaatggtatatagtcagagaaagaagtacaaatcgagtatgtttgtcaaatgggaacatcaagaaaattattcaacagtacacgccagacctttgccgaaaataaccatgggcacaatagatggtgtaatttatatggtagttgataaagttgccctcaagttagtacccacctatgaaggttataaaatatggtggaacgatgcgaatgcactcaaaaatgaaaataaactatgcattggtctgaatctgttaacacgaattgctggcgatagtgcaggcgacataattatagcattgattacaaagatgttcacagatgttatcaattggtgtcgactcaccaaagatgaattagtctggaaaacaaagtatttggctggcggcgtatgtcgttcgaaatacaactattcgttttccacaatttcattgtaccacattctacaagatagtaaacagtttaggcgcctgatgtgtcatgacacaaggtcaagatttattatggtcggtgacaaaatacacataacgagaaggacggaagcattggtgcttgattgccacacctatgccgtagcgagcaacactgctacagggtgttgtctaactatatacagtgcattacagagccgtattgatataatggtgcgagctattgaagcaaacatggttgctggtttatgtgattataccgatagagctggtaagtctggattagatggattgcgcaagcttggtataaatattgattcgaacacattaagtgacattgatttcgctaaatggaaggtgattttgcgagatgctcttgaaaacaatcctcttagcgcaatatttgatatgggcctcgacgatactttcacatctttcaagcaattgatggaaagtgagaaagcaatgttagatatagaaagcagggtagatactactgtaagtctgctaaaatcaaaagtcgctatctgcatgccaagtgggcatggcaagacaactcttaaggggacgttactgagaaaatacccatctattgatgtgtatgatgccgatgattacatcaccgatactgatgccttaggatggtccaatttcgatcgtatgatgatgcaatacaagttgcgcttgtctgatgctgttggaaactcaggaaatagcaagcctaagttggtattgtgccaccacccagatgcagctccagatggatttagcatagttttgtttatgaataaagaaacaccctacacgcccgaacgtctatggaaacgcactaatgaagaacgtttattattagcacaagataagtacccactgtacacggtgtcgttcgctgatatggaacaccaaactatgctgtttatgctacgctcaggtgccacacctagtatcaagttgcatgcaaagagtgagctggttgatccgatgccatacagtgaggctgagcaatttttccaatcgcctggaccggataatttgtggcacatgccaatacaagggaggctgggtgtcaatgatcacaggctagggacggcgcaacaagtgatttataagcaagggccacacgtaggattgtgcagaccaacagtgcagatgttgtgttctagcactttcaatgctgtatcatcacgcctgcgcggcatagagcatctacgtaaagtcaatttcagtagggaggagtatatgacaaagatgagctattggtttaaaccaaactggcgtgatatattattggattaccagaatgaggtagtaatgccaagtgtttcagcatcactcgagtgggctatcaacaaagggcataaagtagaactaatacgcgatatggctgaggctgtcttaaattacgaacgcgccactgaatatacgaatatacaagcacatttcaaggtagagaatctcatgaaggaaaacgtggatgagcttgagcaccagcttgggcgtattatcgtttggaacaaccaaaatgttaacatgatactctgcccgattgtcaatgaatgcaaagcacgattcaagaatttgttcaatgacaatttactaacatacacagatggcatggacatggtaacactaaacaagcatctcagcaaaaattcacgttcaaagtatatgatcgaactagatctcagcaaacaagacagacagacagataaacaaataatagattttgaacaatggttgttaactgagcttggactcgacggtagagtcgtacattatatgaatggtatactagatgggtttagtttaaagacaccagacaatgtgacgggtttcatgccaacaatgcacctatctggtggtgctatgacatcactagggaatgagatgcgtaacttgttactcctgtcagacatatgtaaagataaagccgtgaaccatgtgtacacactaggtgacgatagcctcatactcacggatgatgattttgacggtaaatacgtggcaatagtggctgctaataaccacaatgttaaatgtaccttcacaacgtcagaagattctggtgttttccttcaactaatagtgatgtggatcaatggtaggtacatagccgtacacaattttatgaggctaaaagataagttagcttattcaccatataacgcggatagtgacgaattcaagtcgaaaacagcgtcgtacttattgatgattggaaaccattatttaacatgtaagcgactgcttgagctaggattcaatggcactgtaccgttaggaacaacgatggaagatagactagaggcaaatgcgttgcataataattgtgatgttgctgatattctaaatgttatacatgatattgtagtagtttcatatggtaaacacgaaagtaaaatcacaattactggtgtaggtgtgctgagttaccgacatctcaaaagcggtatacatatgacgaaagggcgacagagtgacacttccttactagcatcgttccaatcagcagtgcaacaagagttggatagcaactaa

SEQ ID NO: 1195 - DNA, 13506 bp, Botrytis cinerea endornavirus 3
  source 1..13506: mol_type = other DNA
atgtccaactacaccaaaaccaacaccaacaccatgaaccaatcaccacgaaataaaataacaaacattattgattctgttgctctcgaggctaacaacagaatcatgactctcgaaaaagcctcgaaaaacaaacaaaaacaacaaacaaaaaatcaattaattgatgaaactaaggtcgatacacttgacagtcgatctttaacccataccactaatcatttgacacaaccgctttctgtcttcggtggtgttgacggtaacagcgtcaaccacaaccgctacaaagggccgttggccactttagctatggacgaaacaccgccacaagaccgcgtggagcgtaacgcagcgactgatttcgctgatattgaattatcatccagtacacctgataagtcaaatgctctacaaattcaaattcctagcaacaagagcgagttcaacgaggcgccaacgacatttactgagatgggtttccctaagcatgacaccactgagccatggtatgtcaagatgctatctactttccggtccagtgacactaatgctgaccactacaagtcattacatggagtatcacctgcaagtcaaaccgtaataccatggaagaaaattgatgtgcccaaactgattgaagatgtcctggacaatagtaaaacccctgatacgccaacccttaattcagcacgcaaatcgtgtttgtgggtagccatgcacacacttaatcccaggggtatggagcagatacctatcaacataagcaatctaaaatacttagactaccagaaatacaaggtctggcgggcaggtgtgacaaaaggttggttagctattgagattaggcgtgatcattctaaaaaccatttgcactgcctttctggcaaccacaaagagcaattgttatcaggtgatggtaaactgaccggcgttatacactggaaaaaaatgtttacggaaattaacaatgaatcacagttgtcttggggacaactaaactggagcaaccctgatgcagggttgatcaacttttaccacacactgttccgcagcacaaatgcctcaatttcaactagtctatacatacattgcgagaaatctactatgcgagagctcatagactaccaatacccggggttcaagcaacttggtaagacattcgctttgcctgaaccatttccgactcctatgccactgggcctcttaattgagcatttcaagctcaagattaatctgaaaaaaggcttacaactaacatctatactgcgtaatgccaaacaccattatacacttactttaatggatcagagcaacattgagttacgtaaggtaccagcaacattcgatgactcttcacatttaagtttccgagcacttgaaaccatattgtcaacaatttacaccatgtcacaagataggcaattagcaatgaataaccataagcatcaaaagattttgcctaaacctatggtaggtggcaaaggcgactgctggcaacaaatcactatgttttacgcctacacagaattgtggtttggacgtacagatcgcagtgatgctatgcccatggaagaactttatgaaataattaagaagaaagcactcgttgagtacccaatgtttaggtttacacatgagggtgacaacatgtaccatgttgaatatgttggtttagatagaacacacaaaccatcctacaaagaaatgtggacagaagaggaatacgctgaaataatggctgaagttaaagttaaatatgctgggtgctatagactacctgatctggccattgaatttaagcgaataatagatcagaagcaggccgagcacatgtcagttgaaattgacctagcctttgagtgtacggcttatattgataaaatgtatgatttattcgtacgcgatgattacataaccacagaagaaattgacagcgacgttgacaatttcttcaatgcggttgaagctgtgttaacgcaatatgaaggtgacaatgtactactggttggtgctaaggctacagtgctagaaaaacttgctcatgatctaaacgtaccactaagcatgcttgatagtggtgctgtacgagcacaactagcatctaccattgcttcaatgtctgatatagcagtaaaacctcgagacacaagagttgagcaattacctaatgacacgagtgacttagttatcgaccagttaagtcgcgactatggtaactttaagtttattcgcggctcaagtggtagtcacccacatccataccataatgccgctagacacgtcattacccgctacatagtttcactcttccccaagtctgatttgctatatgacattggtggcaatatgttgtaccacgtgcagaatggtgattggcatgtacattcagtgtttaaggctgagtcttatgaagataaatctcggtatctaacctacaccacagctgttgtgaaacacattagtgtgagaaagtcacagaccaacattacgggggcgaccaattcaatcacccaaagcatgttgtcaaaagtgttaacagcagataataaactatggtgcaacagtgcgtggggcgattgtcaacacgggacgaaaaatcatgcgacttttgcaatgtccgttgacacactattcaacatcgagccatctgagttgttgaaaggttatattgcacataaagtaattatggcaaaacatgctttaactgtgcctaaagcgtggcatatggctgattcaggaactctgatgtttgatgagggttactggtcgaaatctgatggcaaccttaacgtggtgttcccgggtgaatcaatgacctaccaaaacagtatcagcttgattgacacttatataaagcgcccactaattatgggtgacagccatgcggtttattgtagagtgaatggatataaagggccacatttaatgatagatcacttcgtcttaccacgcactctagtcattgaacagtttatgaaacatactatctggtctaaccccgacacaaacactattgtagttgtggtacctgtgattgatatacacgctccggttactttattaaaacaacaaccatttaccatggaagccatggtgttgaatatacctttttatgagaaattgatgaatagactactacaaccacacacgtgggaaggattaacccagtatgcggcaggcctagttggccgaacctatggatcagccagtggttttacgcgccagtttgatatcacaaacagggatgttaagaatcattgcttagtggcctattggtcaaataatcgttcacttgaatccattcgtcccttggtaaagcgagctgaagttgacgtgcaccaaccatctttcttgcaacaactttggtcatcacttaaaactttcctaactgagctggggcgtcaatttgaccctactgagtccgatttcattaagaaactagttagtgacaattctgaagactcaatgcatctaggtctgttattagacagtgcatttaaagccatagacagtgttaacgccagtactagactagatgtatcacattacataacaaatggcatgatgtacgaaacgggagtcacagccacatcaaaatgtgttgacattgatacgtggcgacaaaaccatgttgagatgtcacatagcactgtgtacacgctaatcactggtaaggatgatatagctcctgtcacaattgaattgtgcaaggcttctagcacgtgtcaacataatcataaggtagcccatgaacatgtggttggtaactcaattgaccagcgcgtaggaatgtgcaactgttgtggtatactcagcaccctgactgaccaaaatctgtgtgcgttgtgcggaagcacacgtttgtgtcatggcaagagccatttgtgtaaacatgaacacacagtaatcaacgatgagtgttgtggcaaacaagcgtgtgtatgtaagaagaactataagtgttcatgttgtcaaatgcctagcaccttgccggtgtgtgaaatgtgccgtaacgccccaccaccaaaaaccgccgtgtgggacgcaggcattatcaagcagcctaacacgcaatcagaagaaaaagcaccagaaccaaaacctgctgaaaatgacgatcatccggaccctgctgatgatattacaggggactacagtgaaggggatggtgtaatcaataagccagctgggatgttaagtgatgtctctagacgctcgagcatagcaagcgctgttgctgctagtgctccaccgcacatgaattttggtgaccatccatcgcgcataccgttaaacaccaacataatagatagagcacaggctcaagaggctacaagctcaccagttgattatgatgactttatcaacgaaggttcgaatcactctgtagttagtttcgaaatacctgatgatacgtctactattaacgacagagtcagttcagaacgacaattggatgaattacgtaaactagtgcctatcaataatcagccaacaaatgaatatggatttgcgggcttagaggctttaagtacggtgtacaatgccatacgcttcactgagagtgctcctaccaaaccagttaccaaattgacactaccaccaaatttggtagctaggcagacaactgtcagcgcagttgttatagcttatggtgaagcacggggtgatggtttgtgtggtgcacatgccctcagccaactatgtgattgtgatgtggatactgtgaccacaatacttaagcgagtaactggtaaccatgactggtggtctgacgttgaactcgccaaggcagcagcagttttgcgcattaacatactgatagccacaccagctggttccattttgtatatcaatgactcaagcatacgccaatatgtcagtatttgtactcttgttagtttgactggacaacgccactgggtaccatgttcgagtatggttgaccagctatacacaagcgatctgcggaatcaatattacaattacatattcctagcgacttatgcaagcatgagccaagactctaccaaaacagttgctgatgtgcgcgaggcagtggatcgttttgagccgatcaacgttgactcggctagtattgtatcgtaccatgttgatcacgactggtcaagcatcattgctaattacccaaacggtgtatttactacgttagggtatgaacatacatctaagagcttctatggacaaccaatttcaaattatgttaccgagggtgaaaatgggttggtgatggtgtcagctccaacaggatttggcaaaactacacgcattgcagagtttaacgaccaaaagaaaaatcatgtagtaatatcacccagccgcgccacagtaataagcgccacagcttactgtaatgatgtgcttaatatagcatcacaaggtcgcgcagactcaacctggcatcccaaaaataaaaatgactcgaccctgagtagtgcaaaagtagtttacttaacggttgactcagcttacatggcattgtgtagcagcaagcctaacgccacatggttgaaaatgttgtcagggcggtgtatatggcttgatgaagtacatgatttaacgccacgatacgtttgcttagctcaagcattaggctcactcgtaaccggtgtgttgtctgccacactacctaatgtaccacccgtcacagacacgttgcatccaatacgaactatctttgcggccccagatcaacttgacaatgacttcagtgacttcattgaacgtggtcctgagaaagggtcattttgggttgttcccagttccacacagacagccattatgccggctgaacgcgtcacgcaggcagcaggtggtggtgtgaagtttgctagcatcacgtcaaagacgctagcgaatcttgaactaacgactataaactcagccatatgtactaattgtatcactactggatcaaccctaccaggcttagaaaacatacatgatctaggatatagaattacacctgaactgattttcccaccttatagagctgagattaagggagttagtaagatgagattgttcaactacaagcgtcaacagtatgatataacacaattaacgcaatcgaggggacgcgcaggcaggacgagtgtagggtacgcagccatgtcactacctggtgcagctaacacccccccagcacacgtcgaactgctatatagcttaatggttggtatcccagcaaacacaaggtgtaaagatctatatgataatttaaagacaaataaggtgaattttgacaccattaaacgcgagcgtgacgttgcagtgcaacgtggttatgacttccaaaatgaacaatgggatgtactagactcttggatagagacagtgagtgagttgtatctgcacttaaaaaataagatagcttttactgacgcaattgttgacaacaacactatatcagctgcttttatgtctgcgctcaatactgatagcaagttacatattgacaaatctgttaaacgacgaatacaaactaacatgcacaataaacttgttcactatcctaaactacataattgtgactgtgggcttctaacaatcatgggaaaacacggatgcggcaaccaattaatactgcccaaacctgaagccgagtggttcaatacaacaatggagcagtcttatgccaacggtagttttagtcacccgaagtcaatccttgcgattgacacgtcatcttcagctcgtgacgtgaacttatcaaccaaattgtcacaacagttcatgtctctctattttaagatgctcaatactatactacacgcggctaaacatgctacaaccagcaatgttccaacaaacataacccatggtgttctgtttgaaaatgttaccagcaataagcatgcaagtgtctctgagttaaagcatccacataaattgaacaatggctcggtactaggtgtctttgatactaacacgagagaactacgcctagaatgcgtagttggtgccactatagattgctctgtcacgtcaccccaggccatagtaatttcacctgtacacacagctaactatgcgttaggtatggcactagctagcttaactagaaatgtcacactcaactctgctatagcagttgctacacgctccacaattatcgtcggtccacccgggtctggtaagacgcgtgaattgcacagaatgtttgacagtgaccaacacaccaagagaatagtatccaaacagactggacagatatctgaattcaaaaacttgactgtgccaccaactgctgccatattcgcggacaatgtagagaccatatatgtggatgagtttggcttaatgacagcatcagatatattgctgttgtctactaaatgtaatatgatggtgatgtcaggcgatgtaaaccagaaagtagctgatgataccgacttagacacgtcaactactcttgatctttcttggtttagggacaatgtggggtctacgacggtgttcaatgagtcttggcgcttcggtgctaaaaccgcatctgtgttgagttacttcggtacacttggcccatgccacaatgacgatgacaaaggtattggcatgatacaatttaactggctaacaaagaaaaacatcaacactataataatcgaccatgatatacagttaattataactcattctaatgctttagcaatgcagataaaacagatattaggtgcaaacagtagtatcaactgcatgacaacgggccgtgcacaaggcagccaagagaagcgcgtgttatacgttgcttatggtaacgctagtgagacatatacagcagcagagctgtatgtagctctctcacgacatagcgaacactgtgtaatagcagcagactatacgtttgaggctacagctaaaacgtatgggtttaacaaacacatgcaaaatgttgattcaatgcgatatggtgcaaccacgatgccgaaaattcatgatttgagcatgagttacattatggaagcgtggtcaaacatacgcttcaattatcacaaattcgcagagccgaaatacaacaaagcgttcgacaattaccttggttactataatgcactatcgcactgtactgaatacttaaccagtgatgtgtcagacaccaatggtttagatatcagcatatctgcgtgcgtaatctacaacaaattataccgtggtgttgatgacagcgtgttcacacggcctctatcaccacaacacttggagctctataacgggatgacaaatatactcaacacgttcggtcccgggatcacagtacctgtagagaggactgctgaagtaatgagtgagtacttaaggcccattgttagtgtacgacagtactacattataccattttccactaatgtaaaactagttggcaacgctaataacttcacttcatatgcactttgtaatgtgctcactggtgaaatcatgatgacacaaactaacaatttgacattccaactacctactgccaactcactgcgggtgttcgtagaatccatgaaaaacagtgtcaactgggataaagatatgtgcgtacagatgtcaataagcgaaatacttttccagcgcatgaagaaaagcattgcaaagtcatatcaagagatgactaacacgtctgagtctgtgcacaattacataatcagtaatgtaccaacactttactcattgtcatgttgtaaagctactaacttgcccaaatcacaaacgctgttcgaaacaataaccaatagtttaaagactgacacaccatcacccaacaacatgataaccaaagtctacctggatgcggtcaatcaactagttgaaggagatacaccaagaggatcaagcctaggctatgccacactatcagaagaacttatatatgatgcactagtcaacacactgcgtgagttctacatgcatgataatataaacctgtttatttctcaagtgtgtgatattactgcttctagtttcgacgtcagcgaaccaacgagtagcacacatgtgctaactctcccgataaaacgtctacatcaaacagtagaacatatccataaacatatccataacgtagtaattgttgatgtgaaaaagaggaaaataatcgcaaccctcgatataccgcccaccactgaacactattggcatattgatgatctatataagaggacgcaagcactgttattattgggattattagatgaccaaattaacacttacaacaattataaattgagcgatgtcatcttgaacatcaagaaaacagctactaaagcagtcacagcccaggaacagttcttcgctaagttgctcaagtacataaaaaatatcatcaactcgctaggtgttaaagttcgcaaagggaaagaaatgttaaacttgtgtggtatacagcaactgttcgcagcacgaatgaggcaatcagataaatttgcacagagtacagcgaaggtatgctcagactcatactcattagctaccaacacactaaagaatagtgccatcaaaggtttacaacacctagtactaggtcacatttccaacaactacgatattgatatcaataggcaattacagaaaacagttgcttcggcagtgaggatgacacatgacaatcgcgcgggagatgacgtctcaacatcctcactgttacgtttatattatagtttgaagttctacgcgcagggctatgagacgggtgctgctgatattatgggttatgatgtgtttaatataggtaacgtcaaagtgactatcaatgaatcattgccggtgatgttattacgacgactcaatgaagatgcccgcgattgtctgatgggagaaacaagtcgcaagcaaacagtcaaggttatgcgtacacatgctaacaactctaacaaatgggatggacaaagcgttggcttgtcgttaaagcggatgtttgcggctgacagtggtaacacatctgatgatgtaccttttgatgatcttttgtacgaattgaagaccactctatcagacagtgtgtcagcaaccacattggaaaacgcaaaccgacatggaatggttaaactcaactcacttaagattgtgcttgccatgtatcctaaattaacaaccaccatgctgacagtcactaaagcctattacgaattatataatcatgtgtttacgccaacgttggcactattacagaacacaatatgtaaaggagtaatcaaggtcaagaatagcataatacggtttttagagtatgatgctaccctggctgatgctaaattagagatacaagatttacgcgaatcgttggatagtgcacgtcaaagccccacgctcacaccgcttgaaccaaagccaatcaatgacgatggaagcgaatcagagtcatcaatgtacgaagatgcaactgatgggatcaacaacaaaatggaaccatcaagtacagataaaatacacgaaaactcagtgttagcagaatacgttaaacagcagctcatgtcaggcagtggttcaatagatggttcattgtttaccacctgtggaagtgatgtcaaaaccaaaatggtatatagtcagagaaagaagtacaaatcgagtatgtttgttaaatgggaacaccaagaaaattattcaacggtgcacgctagaccgttgccaaaaataactatgggtacgttagacggcgtcatttatatggtagttgacaaagttgctttaaaattggtacccacatatgaaggttacaaaatatggtggaatgatgcaaatgcactcaaaaatgagaataaactctgcattggtctgaatttgttaacacgaatagctggtgacggcgcaggtgacatgattttagcactgatcacaaaaatgttcacagatgttattaattggtgtaagctcaccaaagatgagttggtctggaaaacgaagtatttggctggcggtgtgtgtcgctcaaagtataactattcattttcaacaacttcgttatatcacatcctacaggacagtaagccgtttaggcgcctaatgtgccatgacacaagatcaagattcatcatggtgggtgataagatacacataacaaggagaacggaagcgttggtacttgattgtcatacttatgctgtagcaagcaacactgcttcaggctgttgtttaaccatatacagtgccttacagagccgtattgacataatggtgcgggctattgaagcaaatatggttgctggtttgtgtgattataccgatagggctggtaagtcagggctggatggattacgcaaacttggtattaatattgattctaacacattgagtgatattgactttgccaagtggaaagtgattttgcgtgatgcacttgaaaacaatccacttagtgctatttttgatatgggcctcgatgacactttcacatcgttcaagcaattaatggaaagtgagaaagcgatgttagatatagaaaatagggtagacagtacagtcggtttactaaaatcaaaggtcgctatatgcatgccaagcgggcatggtaagacaactcttaaaggcacactgcagagaaaatacacatctattgatgtgtacgatgcagatgattacatcaccgatattgatgccttaggttggtcaaatttcgatcgtatgatggcacaatataagttgcgcctgtctgaggctattggtaattcaggcaataataagccaaagttaatcttgtgccaccacccagacgcagttcccgatggattcagtatagttttatttatgaataaagagacgccctatacgcccgagcgtttgtggaagcgcaccaatgaagaacgtctattgttagcacaagataaatacccactgtacacagtatcatttgcagacatggaacatcaagctatgttattcatgttacgatccggtgctacacctagtatcaagttgcatgcaaagagtgaacttgttgatccaatgccatacagtgaagcagagcaatttttccagtcgcctggaccagacaatttatggcacatgccaatacaagggaggctgggtgtcaacgatcataggctaggtaccgctcaacaagtggtttataaacaagggccacatgttggattgtgtaggccaacggtccaaatgctgtgctcgagtactttcaatgctgtgtcgtcacgcttgcgtggtatcgagcatctgcgtaaagttgatttcagtagagaagaatacatgacgaagatgagtcattggtttaaaccaaactggcgcgatatactattagactaccaaaacgaagtaataatgccgagtgtttccgcatcacttgaatgggctatcaacaaggggcacaaagttgaactcatacgcgatatggctgaagctgtcttaaattatgagcgcgccacagaatatacaaatatacaagcacatttcaaggtggagaacctcatgaaggaaaacgtggatgaactagaacaccaactcgggcgtatcatcgtttggaacaatcaaaacgttaacatgatattgtgccctattgttaatgaatgcaaagcgcgatttaaaaatctattcaatgacaatttaataacttacacagatggcatggacatggtaacgctaaacaagcatctcagtaaaaattcacgctcaaaatatatgattgaactagatctcagcaaacaagacaggcagacagataagcaaataattgattttgaacagtggttgttaacggagctagggcttgatggcagggtcgtacactatatgaatggtatactagatgggtttagtctcaagacaccagataatgtgacaggtttcatgccgacgatgcacttatctggtggtgctatgacgtcattagggaatgagatgcgcaatttgttactcttatctgacatatgtaaaggcaaagcagtaaaccatgtgtacacactgggtgatgatagcttaatactcactgacgatgattttgatggcaaatatgtggcaatagtagcggctaataaccacaatgtcaaatgtactttcacaacctcggaagattcaggtgttttcctacaactgatagtaatgtggatcaatggtagatacatcgcagtacataattttgtgcggcttaaggataagttagcatattcaccatataacgctgatagtgacgagttcaaatcaaaaacggcatcgtacctattgatgattggtaatcactatttaacgagcaaacggctccttgaactaggatttaatggcactgtcccattagggactaccatggaggataggctagaagcaaatgcattgcataacaattgtgatgtatcagatgtgctaaacataatacacgatatagtagtggtttcatatggtaaacatgaaagtaaaatcactatcaccggagtaggtgtactaagttaccgccatctcaaaagcggtatacacatgaccaagggacgacagagtgacacttctttactagcatcgttccaatcggcagtgcagcaggaattagacagtaactaa

SEQ ID NO: 1196 - DNA, 13641 bp, Botrytis cinerea endornavirus 4
  source 1..13641: mol_type = other DNA
atggccaaccaacaacaaccaagcaaacaaattcaacaaacaacaaacaaccacactgctccagaggcaggcagtgcggttgtgacactcgaagatgcctctacaatattaacaaaacaacaacaacaagaaaacaacacaaatagtgctacgaatgataattatgatagcaattttaagcctaaacacgtcacccaggctaatacatattctgagctgtcatctagcaacacaattgttggtaacaaacgacacgaccaagttacgcgtaatttggtgccaacgcaccaggctatcggatttggtaaggatggcctgggcatctatactacagcaactggtttcaagggaccatgtgcaacgcttgtgaacaacaacagtacaaaaacgttagatgataccatgtcagcaagaccgcagacgccagctaaaaaaccgagtggtagcaccaaagtgccaacaaacttttcagacatagatttgagtagtagtggcgacaacctgcgaacaggacagttacaactgcaaatacctgaaaacacaagtgctaatgaaccatctccttcaacattcactgagatggggcaccctaatgccagcgtgcagatgccatggtacaagaaattaatgactaattactatgtaaccaataccagtgacaagcactacaaattaaaacatggtgtgtcacccgccagcaacactatccaaccatgggttgctacagaagttagccttgatgtcagtgaagtacttgacaatagtatgacaccggatacaccaacgctgtcaacactcaccaaatcatgtctctggaaaactatgtttgcgttaaacgcagatggtatggaaaatataccacaaaacattagcaacttgaaatatttagattatcaaaaatataaatattggcgtgcaggcgtcaaagatggttgggttgctctggaagttcaaagagaccacactaaaaaccacatgcacatcgcctttggtcagcacacagaacaacttttctctggcaatggcaaactaacaggcgttattcattggactaaaatattcacgccagttaatagccacacacaactgtcttggggtcagttaaattggagcgacccatcgcgagacttagtggagcattacacgacgctgttcaacgttgcacacagcaccaagccacgtggcataaccctacactgcaccaacgacttgcttcatgatttgttgcaatacttgtatcccggcatgccatctttgggtatagccatgacaacgttgcccaatataacagcacccatacgccttgaggattacttggcacacacaagctgtaaacctaagttgaagacttatgctttgcagcaattcgctttacagcaaagcacttatcactatgccattgagttgattgataattacaatattgaaatacgacaagtgttggccgatttcagtgataatactctatactcatatagagctatgacagcaacattatcgatgatttccctgttgtatgaagagcagaaatcgcgctacaactaccatttaattaagatggctgacagccaacctgttgttggcggtacatctgactgctggatggacttaatgatgttttatccatgtgcagacttaccgagcgacacacgcaaaccaatacctatgcgccagctaatagaaatcacgagtaagcctacatatacaaatcaacctaggtttaccttttcccaacttgacaacatgtactaccatattgaatatgttggtatgtgtggaccagcaccaggtatggcagacgaagacaattatgacaactgtggttttggtggtgaagatgaatttgaaggcaccctgacaatagaagaacttagagagaaaatgattagtgttattgcaagctcaacaaattcaaaagtaggagatgatgacacagcaaatttgaccagtgtcaacaaccccacaatactagacttggctacaatactttataatgtggcatgctacccatttgacttagaaggtgacaaactaggaaaataccaagacattattgaggagttagtctacgcattacaagtcggtggcccttttgtgggggctaacaaaactatattagagagaattgctgcagatatgcaagtcccattgagtatgttagacagtggagctgtccgtgctgaattatcaaacactattagtaagatggcagatctggccatcaaacccagggacacaagaacagaacaattaccgaatgacaccagtgatgaagtggttgatagattgaccagagattatggtaattttaagtttatcagaggttctggtgggtctcatccccacccataccacaacgcatcgcggcacgtaataacccgtcatattgtatcacagtttccaaagtcggatttaatttacgacattggtggaaatatgctatatcacacacaaaacggcgactggcacgtgcactcagttttcaaatcatcagcacctgaggacgcagctagatacgttaaatataccaaagctgttgttaaacacgcagtcactaaattagccagtgctaacatcgtagggggtgatgtatcggtgagtgtagagatgctgcagtctgtgttgacaaaagacaacaagctgtggtgtaatgccagctggggtgattgcaatcatgggacagacaaccatgccacttttgctatgagcgttgacacactttttaatattgatcctgatgagcttgtcgctgggtacatcaaacacaaagtcataacggccacacatgccataacagtacctaaggcatggcaccaagctaatagtggcacgttgatgtttgatgaaggctactggagtaaatcagatgggtacttaaatgtcgcttttccaggagagtctttagtataccggaataagattgagctaattgagacctacattaacaagccactattggtcactaataatcatgcagtttactgtagagtgaatggctatattgggccacacttaatgatcgagcattacgtcattccacgcaccaaagtcatggaagcaatcatgaggcatgccatttggacaaatcctgatactaacaccataattgtcgcagtaccagttattgacatctacgcaccagttagcgtattaaggaaagagccatttgtcatggaagcaatgtgtttaaatttacagttctatgagaagctaatgaacaggttgttgcagccacacacgtgggaaggtctcacacaatacgcagctggtttggttggcagaacatatgggtcagcgtcgggattcacacgccaatttgatattagcaattctgatgtgaagaagcattgtttgatagcatactggtcaaacaataggtcacttgagtcattgagaccactagtcaagcgctctgaagagacagtgcatcaacctagtttcctacagcaagtatgggcgtctctgaaaacctttctcatcgaattgggtaggcagtttgatccaacagaaaccgacttagtaaagaaattggttgctgacaatgcagaagacagtatgcatattagtttgcttatggataaggctttcaaggcaattgacagtatcaatgctagcacgagacttaatgtttcgcaccttataacagaaggccagttagtcaacttgaatgtaacatcttcagcagaagttgttgatatagacatatggcgggaagagcacgatagcatgcgcaccagcaccgttaaagacatgattaagactaatcagggcctaaagaaaatagaacatttagagtgttctataggccccaattgctctcataaccacaaggtttcacacacgcatttgattggcaatggggttgatgcaggagttggaccctgcatttgttgcaacgttctaagtacgcttactaatcaaatgagatgtgctctgtgtgctgagacacacttgtgtagtggcaaaagtgcactttgcaaacataaacatacagtgataaatgatgagtgttgtggcaagcccagttgtgcatgcaaaaaaatatacaattgcgactgttgtcagatgaagtcaatacaacctgtatgcatgatgtgtattgggttcgtcaagtcaggtgacagtgctgcaaaggttgttgccacagataaaccggtgtatacagatattacagtgaacaatgatgttgaaatggctgggcatgaggttgcgctcaatgaagacaatgtgctgtggcgggataacaggccgcaagacaacgaaccacaagaacaacaaaatgtggaggatgatatgggtacggcgtaccaccacccaactgccgtcagcatcagtgaagatgctgatgacgccttagaacgggacatgttgttcacgatgaaccaagccggtacgatgcagactgctaatcccattgacccagaacataacaatttagatgttcctcacagtgaatcaagcgatgtccaaactattatcagtggtagtgtgagcccaattagcgaagtccacagcattgaattgcctgatgatgtgagcaatcttaaaccattagttgatgggctcgaagcaagacatatcgacaacctacggcagctaaccggtaaagacagctcacaagtggacagttatggctttaacgatggagaagctctatcattaatctataactcaataatgttcgcgccggaagccagctcaaaacagtggggtgctgctaaactaccacccaatatgggcgcccgccaaaccacggttagtgtcttaattgtagcatacggacaagctattggtggtggaatatgtggtgctgatgcgctcagacagttagctggtgtgacgctcgaagacacaatcatgactcttaaggcggtcacacataaccatgagtggtggtcaggtgaagaattagcaaaggttggtgctatacttaatttgaatgtgttaattgcaacaccagacgggtcagtcttatacattaataacactagccaagattactattacagtatatgtactttagttagtgaaacgggtgagcagcactgggtgccatgtactgcaataataaatcaattatatagtagtgatacttacaattcttactataatttcttgttcttagctacttatgccactatgtctggctcgaaggaagtaacgtatgatgaagttattaggaaagtaagtgagtgtgagttaattagcactgaagctgcatccactattagcaatcatatagatactgattggagtacagtgattaagactttccctggcggtagattcacttccaactcatatgagcacttgtctaaatcatttgccggcaaagatattcaagattatactgagaccagcgaaaatgggctgttcttgattactgcaccgacaggtttcggcaaaaccacaagagtggcacaatttggtgggctgaaatctaaacatgtagtaatcagcccatctcgttcaacgataatcaacgcagtcgactactgcaatactgtacttgggatcagtgcagctggtagagcaaatagagaatggcatcccaagggcaccaaattagaagctttgtctgacaagcaagtgatatacttaactgtcaatgcggcacatgatgctttgtgtggtaagaaccccaaccaacaatggctacaaatgttacaaggacgcaagatatggttagatgaaatacatgacttaacaccccaatatctaaaattagcaagcacattgtcatctcttgtgacaggagttatgacggcaacaccagtatcacgaccacccaaccttgatacacaatatccggtgcttaccaagataactcataatgatgttattgatatggaattcacagagcgctgtgaggttggaccagttgatggtgaattttgggtggtaccatccagtgagatgacgactcgaatgaaccatgacgaagtaaccaaatatagtgcaagcgggcgcaactttgctagcataacagcaaaaactttacctgaagtaaacatgaattcaattgactcagggatttgtactaattgtgttacaactggcacaacaataaccaagctaagcactattaatgacttgggtctaagagtcattagtgaactgatttatcctcccattgacgagaatgtgactaataaacgtaaactaaagctatttagctaccccagacaaaaatatactatggcacagctcgtgcaggcacgtggcagggctggtagaaaccgtgatggcgttgcacgtatggcactcccgggtggtgaagaacagttaccactacacactgaattattgtatggtttaatgaacggcataccagtgaacactaggtgtaagactttatatgatgctttacgcacgaaaaaatttgagaaagatgatttacttaaacgtagagatgaagcaatgactcggaactataactttagtactgaacaatgggacaatcttgacgtttggatagacacagtagaggagttattgaaatatgtgtcacgtcctatatctttcacagacagcatagtgacagatacaacgattaaagaagcattcatgtcgagtcttaacaagaaaagcacgctacatataagccgtgtttctaataggaatatacaaactaatttgtttgataaaacaattagatatccattatttagagtttgtgattgtgggctattgactgttactgggaaaagtgggtgtggaaacaaccaccaactaccagctatactagctactagttttaataacatgatgacagcctcatacgtaaacaacacatttgagcacctatctggtatacaagctatcgacacatcaccaagtgctcgggacattgatgtgcgttataagatttcacagcaatatttttccatttatacgaaaatgttaaataccattctgcatgctgctcgccttggtatgtcatctaatttacctctaaccagcaaaaatggggtgtacttaataactgccaagccagacacagcctatgatgtgtcaacaataccacatgcacacaaagtcagcaataactctgtagtaggtgtattagacttgaacacacgtgagctacgtttagagactgttttaggtggacggattaacgcgtttacgacatcggcggcgtgcacccttatcatacctgtgcatactgctaattatgcattaaatatgtgcgtaaattcgttgatcaatgaagtaacactaaattcatctattcaggtagcttgtaaatcgaccttaatcaagggccctcctgggtcaggcaagactaaaatgctatgtgacctttttgaggctgatactggccgcaaggttatgatctcgaaacagatggacatgttaactgacaacacaatactagcgctgccaccaactgcagtatttaataatggcttgtcatacgacaccatatatatagatgaggttagcttgatgacatcaagtgacctacttttactcagctcattggctccgcggtttgtaatggcgggtgatatgaatcagaaaatagcagatgacactgatttagagacctctacaacacttgatttatcatggttcaatgacaacatcagtgatgtcaagcagctggatgactcgtaccgtttcggcgacaaaacgggagcggtattgggttattttggtaccataggccagtgtcataatgaccatgatatgggtattggttttgagtatctcacttggatgacaaacacagccatcaatgacttagtgattaaacatgatatacaactaatcatagcacattccaatgcgtcggtagcacagataaaacaattccttgggcccgacagcccaattaagtgcatgacaacaggccgcagtcagggcagccaacagaaacgtgtcatgtatgtagcatacaacaaccctagcactgtttataccaatgctgagttttacacagctttgtcaaggcatacggaatactgtattatagcaggtgattacaatgtgggtgcaaaacttaagcaacacggagtatttaaacattttactgacacaggcttaatgaggtatgggtcaccaacagccaatgagcaagtgactatgacacctatacaaatagctagacgtttaaagaaagactcggtaagacattcggctattaaatttaaagacacacagcttaacatgctacttgcttatgcttcaaaagttaaagcatattactcaagctttatagatgatgtcttaaacaagaatgtcaccaatactggaacagggttctctgtaatgttatgtcacgtttacaatcaagtggtgaacggtgtgcgcgacgtgggttacatatcaacactgaatgcagctaatttgtctacttacacagcgttatcatctgcgttgtcagttctgagtgaatcacgtaatgttaacccaaatctggcaatacaagcagtctgtgacatcctaaaaccacaatgccatgtgggacaatatgtggtcatgccttacatgtcaccagtagtggagagtggctcgggtaaacattatgcagacttttatctattagatataaatgagtgtgctacggtatatctagaggaaacacagttgaccacgacagaaccaactgttgataacatattggcagcctgtcaaacggtcagagacagtgataaatgggaccatactatgtgcaagaaatttggggtcatgcacaagacctacttagccgcaaggtctgaaatagcgcaccaatgtagctggtatcaaacaataaatttgccgcttggtgtcaagaaactagccaactcttatccgctgtcgataatgagtgcctgtgctccaacacgtgatttagcacccattaaactctaccaagcgctggagaagatgattatggggagacttgatggtacaaagacagctagtgtaagcagtgaacgaataaccaggctatatatgatggcacttaaggacacttcacggaaggtgaacaaatactcaccgtttgaagacgcaatggacaacattacatatgacaggctcacattgctgttgagcaagaacactattgcccatgatgtagataaattcatttcagaccttagtgatatagtatccccacttataagtgatactaactacgtgatcttgcctctgtcatttgggatctcaattagaggagcgacaaatgagcgtgagatagatgctgcatttatagacattggcagaaagaaaattatagctagagtaaacatacataattttgggaatgatgagtgggataacaatgaagtttggcatagaatggaggtattattgaaaataggggcgcttgacgatcaaatttgtgaacactcatggtttaatcttttgcaataccttaagattggcaagaaagtaaggaagataatgtcaaccggaaccaagcatctgtttggtaaactgtatgctggcataagtagcataatgctcactctcaacccaacatcggataagttgccatcagtactaaacatttttgaactgcttatggctactattgacaatgctcacagaacattagggaacttagcaactagcgttaaaactaatgttaataaagtccagtctacttacacgcgtctggcgcaatcaatcgtggcattttacaatggtgaaataaaatctgacgtgttgtctgctattgacacgcggattttgatgactgatggattcacagtagaacatgttattgtaaaagtagtagatgagatagcaaaagagcacacacggcgatctgggcaattggctgcctataatgtgccccaattattgagagcgcgtgagagtgtttattgttacttggctggcctgggcgattgcgcctctttgctaatcaacaaagctacatacactatcagaacattacagatgtatatcaataacctcttaccgactaggttggtacttgatctaaacaagcaagctagtgaaactcagaaaacaaaattggctaataaatctgtcgttgaaccaattagcatgagctttgaatggaatggcgccaatgcagcaaagtacataaagtcaggttttattagtgaggcaggcagcagagaatctgaaatgctcttcgactatgactcatatgaattacagaaaactagctctgatgctccaagtgatgtaacacgtgctggcatgcaaaacctacgagttttggacaatctattaagaagccacccactgctcaccacgtcattgttcagtttagctagggcttactcagcggtattaacagcagtttttgaaccactcaaatcattatggcacaggtgcattgtgagcccaatgcgacgagtacaggatagcattataagattcctagaatatgatgctattttgttagatgcagaaaacactataagcgatttgacagcacaattgtcagctgaagaatcagacagtgccataagcgtactaaacttgggtggcaatgtgatgtcaggtgatagtgacgaagagtctgtgtatgaagatgctgttgatgcagtgaaatcaatgaccgaacacaaaccatcgccaagtgacaaatcacacgagaattcaactcttgctgcacatgtgttgtcacgcatacaccttaaccaaggtacaattgatgataggctattcagtgtacaaggcaagttagccaagtgcactttgtcatttgacaagagaagacagtacaagtctggcctcatgataacttggaaccactatgaaaattactcgactgtgaagcctaggattggcccaatgtgcactttaggtgaagtggcaggtgtactgtatgcagtcatagaccgtgtggcgattaaattagtaccagtttcaactggttaccaattgtggtggaatgataaaaatgctgtagcaaatgagtctaatttgcaattggccttaaccctactatcaaagactagtggtgatactggccctaacccggttttggcattactgatcagtatattcacagacatgctggcatggtgtaggcttatgaaagatgagcttgtgtggaaaaccaaatatttggcaaatggagtgcaacgaacaaagagaagctatgatatgtctacaaaaaatctgtaccataatttacaagacaacgtcgtttttaagaggctgatgacgtgtgacacacggtcaaggtgccatatggttggcaacacgttacatatatcacgtcgtaccagagctttaactttagattgtcacacatttgctgtcgcacgcgacgatgaaaatggcatggcagtgttaacaatttatagtgctaaacaaattaggattgacttgatgctcagagcaatagagcataagatttgtcgtgaattcatatcagatgatacgagagctggtaaagcaggtctagatgggcttaggaagctaggcatcaacattgatgcacgtgatgtttcagacgccgactttgagaaatggaaattaatcttgcgtgacgcactagcaaacaaccctttgagtgcaatgttcgatatgaacttagatgacacttttacatcattcaagactatgttggatgctgagcagtcattgatggacatcacataccaagttgaccaaactatgtccatgctacaagctaaggtagctgtttgcataccatcaggacatggcaagaccacgttaaaatcaactttgttgcgcaaatacccatcaattaacacacttgacgccgatgattatataacagacttagacgcccttaactggggcaattttgatgtaatgatgcagcaatataatgtgcggctaactgaggctgtgcgggcgattaaaaatagcaaacccacattgatcttatgccaccaccccctagcagtgcctgaaggattttcggttgtgttaatgatgaatacacaaacacctgacacaccagagaggttgtggaaggaaactaatgaaaaacgcctcttggctgagcgagacaactatccactgtactatgtcacgtttgaaaccatggaacatcaagtggtattgttcatgctgcgcaatggcacaaccccatcaataaagttgcatgctaatagcgagctggtagaccccatgccgtatagtgaagctgagcaattctttcagtcacctgggccagataatttatggcacatgccggctgctggtaaactcaggcacaatgaccacaaatttggtacaagtcagcaggtaatatataaacagggaccacatgtcggattgtgcaggcccacggtacagatgttgtgcagcagcactttcaacgcagtatcctcaaggctacggggtgttgagcatttaaggaagcataattttgacaatgagcaatatctatctaaaatgcagtattggtttaaagatggatgggagcaagagttgaaaagttttggtgcagacattataatgccaagcattgatggctcacttagatgggcgatcaacaagggccacaaagttgaattaatacgtgatatggctcaagcagttctagactttgaaagagctacagaatacacaaatattcaagcacattacaaagttgaaaacttgttaaaagagaatgttgatgagcttgaacaccagcttgggcgcattattgtgtggaacaatcaaaacgtcaatatgatattgtgtccaatcatcaatgagtgcaaaactaggttcaagttgttgtttaatgataagttggttacatataccgatggactagatatggtcacactgaataagcatttgaaaaataatgtgagatccaagtatatggtagaactagatttgagtaaacaagacaggcagactgataaacagatcatccggtttgagcagtggttcttaggaaaactaggtctcgatgcaagagttgtgcgctatatgaatggaattcttgatgggtttagccttaaaacgcctgataatgtgtctggttatatgcccacaatgcatatgtctggtggagctatgacctcactgggcaatgaaatgagaaatctgttgcttctttctgacatctgcaaaggaaaagcggttaaccatgtgtataccttaggtgatgatagtttaatattgacagatgatgattttgacggcaaatatgttgctatagtagcagctgagcaacataatgtgcggtgcactttttctaccagtacgacacatggcatatttttacagttgataattacgtgggtagatggcagatacatagctgcacacaatatattgcgcctacgtgaaaaactagcttactcaccttataattccaaatcagatgaatacaaatcaaaggtagcgtcatacttactcatgataggcgataattatttaacatccaagcgtttgctagaactagggttcaatggtttcatacccctaggtacaacaatgactgatagacttgaagcgaatgcagcgtacaataattgtgatgtgtctgaaattttaaatgccatcaatgatattgtcattttatcttatgggaaacacgaagaaaaaatgactctgacaggagttggtgtgctgtcatataagcatatgaaaacaggcatacatatatctggtggtcgaaattcagataaatcactactgaatgagtttcaaaccgctgtcgaaaatgcattagataatcagtag

SEQ ID NO: 1197 - DNA, 1730 bp, Botrytis endornavirus 1
  source 1..1730: mol_type = other DNA
atgcatgtactaaagcagattatcaattggtgtcagttacacaaggatgaactagtatggagagctaagtacttgtctggagccatcaaacgagaagagaaaaatttacctatcaccactgttgatctctggcatgcgttacaaagtaacaccaacttcatgcgtgttatatcttcaaaccgtggtaagagatcacgaatggtaatggtcggcaatgttctacatattacacgtagaacaccagccgtgttgcttgattgtcatacttttgctacatgcagggatactaaaactgggtgccgagttactatctactcagcaacacagaacagaattgatatcatgtttaaactaatgggtttgcatggagtgaatgtggatcatttggaagatgccagggcgggcaaatcaggattggatggcttaagaaggcttggtattaatattgactcaacaagcataagtgacgatgactttgttaagtggaaagacatattacagcgctcactcaactccaatccgctaagtgctttgtttgatatgtcgcttgatgacgtctacaccagctataagaaactgatgagcaatgaagaagacttatttgctatccacaagaaagttgatagtatggctgaagccattggtgcaaatctggcggtgtgcataccgtcaggtcatggtaaaacaacgactgtcaatttgttgcgtagaaaatatagcgggtttaatgtagttgatgcagatgaattggtaaaagataccactgttatactgagttacaactacgagttagtaatgcaggggtacaaacgtgatattgaagattcattgccaaacaataacaagccaaccattttgttttgccatgacccagtgtgtgtaccatcaggttataacactattatagtgtttaacacacagacgccgtacacacctgagcggttatggaaaagccaaaatgaagagtcgttaaaaaaacaaagcatctattatccaacttacaatttaacttttgaccaaattgaagacgttgttttgcatgctatgattaccaagaaaacacctaagttggttcaacttagcaacagcgagttaattgacccgatcccatcgtctgaagcggcacagttttttacagacccaggcaatgatttgttgtaccatatgcccaaagaagggatggtttcgttcaaagatcaaaaccatggtatatcgcagcaaaaaatctataaacaaggtccacacgtcggcttgtgcagaccaacggtgcagatgttagcaaactcaaccttcaatgcagttagcacgcgtataaaaggagttcaacatctacgtgtcaacgacttcaataatgaacagtatatgtctaaaatgtcacattggtttcgaccaggatgggaagacaaactaaaagagtatcaggaagaattaattatacctagtgtcagtgcagcgcttgagtggtccattaacaaagggcataagattgagctaattagagatatggtgcaagccgtcatggactatgagcaagcggtggaatatactaatgtgcaggcacattacaaagttgaaaacttgctcaaagaaaatgtagatgaactagagcatcagattgggcgtattattgtctggcataatcaaaatttgaacatgataatgtgcccaatgataaacgaatgcaagaaaagattggttttattgctcgatgataagaaaattacctactc

SEQ ID NO: 1198 - DNA, 10802 bp, Brachiomonas submarina endorna-like virus
  source 1..10802: mol_type = other DNA
tgcaaagcgccaccgcaacactgggtgttggtggtgckgsgaagagcactgaaatcgcacaactaatggataaccaaacagtagtcgttgctcgaaccacaccggctcaacaatcaatcagagacaaattaggaagcaagttaaatcagcttcgtgacaatgtgatgtcattagagaaggccagcattatcaaaccagactgtaaacatttaattgttgatgaagccacccaaataacttggattgaactattatgcatgttgggtccaaacaccgagagtttgtcctgctacggtgggttaactcaagtggcaatagtcgacatggacgaacaacgaggtgtcaggactctgaaaccaataaccgactacatgaagcgaaaggaattatgggagactcacaggtacggcagcacactggcgaatagtttaagaccggtcttcccaaagctacgtagtgtttccaagcacgacacctcagtcacaataataaactggaacgaattcatgagccaatccctagcgggattgatttccgtccacaaaccaacaataattttgacgtttaccatatcggcagaaaatgtcgtacgcaagtcacaaaaattagcgtccactaacatcccaatggcacgagtccactcgtaccaaggttacgaatccagccgagtgatggtcttccaatactcgccaaccgatcctttaagtgggaagcatttagacaaattttactgctgctcagcagctgagcgtgccaaagatgcactgatatgggtgagagttggcatgaaacccacagccacactgtcagaatgcattgacccaacaatcaattacactggcggatttgaattacccaaacatgacgtgagaaccaacttcttggccctactgcaaccactcatatccagaccatctgaccacacttacaagctgtgcaagcgcgcaattgacgaggaaaatttcattggtcactctaacaatggcgcatgcccaatgcattcaataataacaacaggggacaacattttcagcgatgtcacatctgaaccaaaccaccaagtcacactaccacgcacgctggatataccagagaacctaacatcagaattatccaaacatcaccttaaattggagcacatagaacttaaagaccatttgcttagttgcaaaattagccacaagaaccctttattaaacatggtgatgggaaccttaggcgatttgagatgcgacatcagaaccggcatagtggaacccaaggaagccattgacaaggtcgaccagcaaacaagatcaatgatcgttgagtggctaggcagcttgaacacgggccaaccccaacagaaagacctcgtggagcacgccaccgacgaaaccattaagccaaccctcaaagcccaccccatcaacgtaccacaagcatgggactaccacggcgatccgccagagtacactagcatgagcaacaacaacttcaccagtgcacaagaacaattccctgcggaccacttgcaagggttagcactagaagaacaatgcacttgttgcaacaaggtagcagaagcgtttgagccaacgagccatgccaccattacaaccagagacacagtcgccatacgttacagcagtctcatatgcagcactgtgaaccgagggcaaatgttattcaaccccacgatggaccaaaagctgggggtccgatcatatggtggttgtgacctatgcgccggactcaagttctacataaatgggagagttaagctggtaattggttgccagtatcaagacctgcgaacgaggaagatatgggacacaacaacaacagatgaagataggtcctcgatagcttccgggctagaggttttatcactacacacgatcaaaggccaccttggttggggaacaaataaccactaccccaccattgtcaaccctgacgagagaacattgaacatggcaatgcacttggaaagactgcgccacactggttacttcttaaaaaatactatattcaaattgaacttaaccaaccccgacgcttgcaagtttaacactgctgcaaatggggcctggttggctaaattcaatgggcacataactagtttgggattcgaccctctaccaactagcattataacccactcccactacaacgacctagcaatctacaaattaacaaaaaacaacgaactagtcggcttaatgtctggtgacatgaaaagagcctgcccactcacaaacaactgcccttacttggccgccacaatcctaagcccaacgcaactgttaagagaaattatagatttaaaaatcagccgaatgcaatttttgatttgtaaacccaaacctatagggacaaccttatttgcgggtgacggctacaacttgccattggaagaccaccacaaaatgaaaaacaccgccgtttggcgcgagttttgtcgcagacaggccatgttgtcaacaatcaacatcatacagccacaccatgccgtgtacctacccgaaccgtgcatcaagaagtattccaaagcaatccaatcctactctggcacattacctgtagttggccacaactaccccgtctcaaagcaaggatttgacactgtggtagactgttttgcatttaagttagtgtcaaccaaacatagaactggtgtgataattaacaccagtgacaagccctggttgggaattgcagcatcatcctggaacacagtggccatacccaccgaccacaatgctagagtagactacgaccaggggtgtagtgaagcaaccgccatgctatgccaccacaaggagattcaagaacgcagggttgctagctcaacacctgacagtatgggcggagactcaaattcagacaacgttcgagagttgctgttaacgataaacactcagttagcgagtgacactgacgggccactactatatgacagcaaatggaaagaccaactatcattggttaaaacttcaaaaatcaaagtggggttcgctggcatatttggatgccaaatggaattgtgggatattgcagacactctacacaatcataacctaaactccctttacaccgtgcaaccaccgctcaacacaactacacacaacgaattcactgtggaaggtaaattaggcacaatgaaagtgatgtaccatgactgcaatcggtctgttagaccatctgtctcagcctacacccactcaatatctggcagcccttacccatacgttgaaggtctgtccctggttggggtaggcgatggcataattatgggacacacagtcacttgttggaaattagtgagcagcaccatgactgccagcctttatcacagcccaatgggccaccatgacccaagccaatatgtaacaatctgtttgccatcagcccaatcaatcgctggagccatcactactggcaaaccatccacaccaagttaccactccgtcccgtcaaaattagttcggatggttgaactcagaactctaagggattacagtttcgatgatctcctggtgtacgtgaggcaacttatgcatgctgccttttatgggaaaactgggaccactagccagtacaaaactgacatcgatgacgcaatggctgtttgtgcatatgtgcatgtcacacaaacgttgatatccagacaattcgattgggtgaaacgaattaactctaaggggccaccccaattggtagcctcagccgtcaaagatatactgttgcttttcaaaccattgctacaattgattcctgaacagctagatcttgaaaccatatatcataaactagtaacacaattggccccattaactttacagcgtacacttaaagagtggatcagtgaggccgtcaacaatcaccccagattgtatgcattcaagcggcagctatttgggccacaccacaaaacacaacaaagtctcaaccacccattaaattacgagtcgcaacccaccatgcaactagcaggagaaactgtatccggccccggcctaaccaagcgatccattgaactgctagggaaaacccctaggaacctaataatcaaccactacttcaacaccacagaacaatcaccatacgacggtgaccactggactaaagggttgttatcccggtcagaatgtgcagatatgagtatgaatggtgcatacacacaaactcacaccccaacaataataaccaaccctggcagcacaatgccaccagcagactcagatcaatctgatgtcgtcaatgggtcgactggaccagctcaaccggaatcacacaaaaccaatgaacatgccaactcaagcaatcaaagtgagccaatggtagaacatcctagcacatcaagccaaagtgaagagccatggcaggccgagccgccacaattggaagcccaacccacaccactgaatcacaatgacccacccatcaagaaagaacccattccccacccagccagtgcgagtttggtcccatttacagctaccaaccctatgcctatggggcagccacaaccacccagccaccagcctatgaccttccaagaagtgctacttgcaattggaatcgacccaagtgtcatggaaggccacaaacatccgttggattgcataccatatgaaactctacgaactaaacttgccgattcggaaagctttagaaagttcgtagaaactgatactcgacactcgacctacgtggtggcggaagtgatgggtcggttgatgttacccaccacggccgaaatggacacaccagcaaccccttggggccctagaaaggatggctccgacttcgtccacaccgcatacttgaataaatggcacgtggccatgtacctcagtttaactggaaacttctcaataggggcaatgatgacgaatgacaccaaagcttacgtaccattagatgtttgtaaaacagtaatcaccgtgaatatcggcagcttcagagcagaatacaaatctgtgcaaggtcgcagagtggtaacgttattcgagcgtggcaaggaaaaacctcgagtggacgggccgtcggattacgaatacaatcgcatgcaaccatcagcttacataagaccaccaatgccagcattgcaagaatccgatgccgaatttacagcattgcaacacgtgccagaacgctttagacacttgaagagactatcactgtccaagtccagagcccagtctgaaccacattccaacaggggacgcaataacaggaagtatttgatagttatgtggggcacatggggcgaccttgagtacctactaaacctaatcagcgccgacctaagttctgggagccaatgcttagtgataacctccgagagacatgcagacaggtgtaaatccaaaggttgccaagtgtacccactgccaatcgacgacgctgcgtggctagaagtcagcatgaaagctgaatctgacaggcgaaagtcgatatggaattggagaacagtagccgaattagaccaacaccaaactaagcacaaagaaatattagagcgagagacagataagtttgtccatttaattaaagatgttacccacaccttattcacaccgtacaaactcgaagctagttacttgggtgagttggtgggagcaactcaagtattggtatgctcttatccatgggacctacatttaggccaacacatagacggcagccccatcaatgcctcactggtgggtgcagctttaccaatggctcatgctgggcgagggcgatacccaaaatatttagagaagttcggaccaatgctgagttgcggaacatggccccatgtaatcagtagttaccccagggtatacgtaattcctagaatgctatgcgcaaacccaggccccgaaggcagcttgtacttgtgccaacccagacccaccgacgggccactagatacccaagtggaagtcgaattagggaagaacacactgccaatctgtctatttagtttatccagcatggttgatccgcaaatagaagctttgtgccaaataaccgttgaggaatgtcgatctctaggctactacccaatacttacaatccacccagacaacgcgaagcacccaaaaacaaaatactgcaagcttgctaaacacggcatcgcaaagagtacggacgggacattgatatgttacggtatgaacttcaccccactattccaacgggcaatcgttgcaataacccacggggcaactggcactttcacccaagcagtagccaacggttgtgcgcaactcgtgctccccttcgcctacgaccaaccatacttcgggaagatggctgcaagtctgaacttgggcgccacgttaactggaccacatgacttgtcattcagagagaaattacgatcgattctgaagtgcccagaacagtttatggaaaaggctgctttgttgtggccaactgtgacaatacacccctctgttgaattctctgattgggtaacttacaacaaagaagaattggacgaaaaatacacccagctgcgaacatcagagcacatgagcaccagcaaagattaccacaccgtgaacaacgcgctattaaacagtatcaagtcatttatacgcggattgccagaggacaactccagcatcaaatccaaagtaactggctcacaccgccgacacacactacattgtagcggctgtatggacaaatcttggaggtccccaagattatcaatggttggaaccacaccaacaatcggccacatcaattgcaactggaataccagcaccaacgtgttgcaacatgaaactagtgaggccacgttgcccctcgatcatgtgcatggcaacctacacacagcagggccagccacagcgttaatttgtgatgtggacattgcatgcatgatcgaattatccacagccgacttcctagtaagtcaattattttcaattgggtcagttcgattcctacaatgcttaaaaactagagacagtctgtacggtgcagttaaaaatttgtcccacataacccagtcattgagtcaaaatggactagacagtgtcatagactcactcacgttcactctcgatcaaccaacacccggaaactatctgatgttgcaggtgtcccccacatctcattgtgacaagttgtcagaattactaaaattacctaaattggacgtaagcaaatcaaataccgactccgcaatggccgacctactgtataaacctacacccaactgcacggtaattatcgacgagaatgcagtggaggcaatggtagacagcagatcccggaacccggacgcaccaaaagcaacagcactacccaccgcatcgttagaggacagtttatcatccacagcacacaaatttttgagatgcggccgcgtggctaggccgactcccaatgatttaacagttcagtacaatcccacaaatgtagctggctgcgttgaagcgtgcatactacaaagtaactcacccagtccctccacattaagggccagattacgggcctccaaaacgctgataccactcaactcgtcaaccccccttatcaacatgatagccacattgaacctactcgctgaggattacgtggtgatcgattccacaactgacatagtgcactacaagatatctgatagagggccgccaacaatgtacctactcaaagcaattgagaaaaatcaagggcactgcgtgatcatcaaccactcagaaactgtgtggttgcatgtaataaatgaggaagtgcaaccgctaactgacacatctaatgtaccactgcacttgtgcccaacccacaaacaatatatgttcggcatgcctggaaacatgtgctacgacactcaaccccattttgcctctgcagctgaggcattagaactagtgcaccagctatcccagcccatagtaactggttcaacaatcaagagactagcagagttaacgaggtccgatgagaaggacctatttgctaaactcctgtacaacaacgagtaccatgtgataaataggaaaagaacccctttcatattgtcagagtttggacagtcatccatgagaaccacgtcagtgtactcaagaattgctgctgagcccactgtggtaagaacactcacaacacaggggtggatcttggccctatgcatacctaccggtgaaaacacatctgtactgctgcacgccccattacaccatcaatcattctgtgggttaacctacgtgagcagaataccatggtgccggaaaggccctgcatcgttggttcgaccagatgacctaaaatcatgcacctgccttaacgaggtaacctacaggcacatattacaacatagtccaaccgtggccaagttaatgggtatcaaacaaccttccttagtgacctacatccatgaatttgacaataggacccatcataagagtgacgatgtcagttggttccgaaaggaacaattaagtttacgattaacgcactcagaagcaacaccagagctcatgcagaccatcaatgcaacgaccgacctaccagtgagagcaaccatacatgaggggaaaccttcaaccaccgttgacaccgaaaccctcacagcccaacttgtcacactcagcatgcaaaaatcatacagaactaacaacacggtgatcatcgagctcgattacaacacatttgtaaaggcagcaaagggaccatcgttggggtaccaactagtcaacggccaattacgatgccaggttagagaagaggagttctgcgtgaatatgacatatgaccaactagctagactactagaactcccagtgggcacatctggggctgagttcgcaacttgcctgggattcaaccccgtcgtgccagatcaaaaaggcaagttcttaatcggaaggcccgacgaacgggtcataccaatgggcaaccctatcacatttgcggcctactcagcaacaaccaccccactcgggctgataaccactagaccattgacgtggtgcagacctgtagtggtgggaggggcagatgagtatcaaacaccatggaaagagccgggcagactcaacgacccattgcctgatgtaacttggtacacaggagaatcgtccttaccttttggagaggcagcagcactccaaaccaagccgaaagacgacagtagtggtagcaaattaccaccacacattgatgattacattaggaaccaattagaacccgcttcaatgttgatggccacctctagaccatttagagaatacattcacacctccgatgttgacaacgaccatcggaaaactttaatggcaggttggacgcctgactactgggctagtccaggggagtcattggtcctacaggaagacatcccaattgaaacaattgacttttggtcagacactgacttgacagacaatttgatacgttatggtcctttcagcaccagggttaagagtagtgccgtacctggtaaggttgtaactagtaagcgtgtaaccatggtgccgttgcctgtgtggtctagaccagtgctgactcgccaacacttgcaggaattcaatgccctcaccactaggctggggggggtagtgcaatatgcaaaagggaaacttaacatcacagctgaagttagaaaaattgctgatgcctacttcgtcaccggttggcagtccatggccaatgagtacaccagtaatccaataacttacgattggctggccatcagagattggctcgcccaacgcaaggacaaaatagccgtggcaaaggagataatggaaatattggacatgggtctaagcaccagaccatttaatagaatgcacgtcaacgcaaaactcgaatcattgctaaaagaagtggtgattgacagcatgaggaaccaaaccgccagactaatcgttttccaaccgaaaggattagctgcgctgttttcatctatatttatcgaagccaaaacaagactcaagtcattactaaggcctgaggtggtgtacgctgatggacttaaaccacaagacatcacccgtaggctgaacaacatagttgggaatgacctgatgtttgtggaagatgacctcaccaaacaagataggcaaaccaatcacgacatcctcaatgtggaacacgaaatttacaagttgctgggtgtgtccactggtgtattgtcattgtggcgatccgctcacgacaactggtcatacaaaggcaaagagataagagggaatctcgatgccatgagactcaccggccaagccacaacctcacttggaaacctaattaccaacttgctggttcacgctgacatggttatttcattaaaatccagcatcaaattaatattgatgttgggtgatgacaacctaatgctaacctcagtggcccccaaagaattggaacaacgtagccgcacaaaagcccagtacaacatggtctcttcgttaagtgtttacaaggaccacggcaccttctgtagccttctggcataccgaaacccggatggcacctacggtataggtccggactttgtgcgactacaacgtagatttgaggtacccaacagttcaggtactcaagatgtggaagtcaataaatctagagtcatgtcgtattgcgcaacgttggggccactaccgggtgtgaagaagctgattgatatgcatgacctgcctattaagccggagccctggtacaactactacggggcactaaccgcatgtgctgataagtataagatctctagggacacagtggaacagcacttagccaccctactaaacaccatgagactggagcaagtcacaacccatgaatttcttcatttcactacaacaaggtaa

SEQ ID NO: 1199 - DNA, 13218 bp, Bremia lactucae associated endornavirus 1
  source 1..13218: mol_type = other DNA
atgatagtggatcctttaagtttattagattgtgtgaaatcaccgtcacaaccatttcaagtagaaacgagtagtcatctgattgatatggaaagatggatatcaatcgagcacatcgtgctttttaatccaaacataaatgaattaaggaaagtagttgattgcgtgaataaaacaacaaatgttaccatatgccaattaaaacctaccgtggaaactacacaagacgagtgggattcgaaaaatgatgaacataatacatggtggtctccgatttattccaacgaagtcataaaacaagaaactgaaataatcaatttagtgtctagtgatcattataccatactatcaagtgaaaaagtgcttattaacacagtagttaaagagactaatactatgataatatctaacattaaaatcacacaaggcgtgccaaatagcctaattaagaaattgatttcttttaccactgatttaaataagtactttaagattccggtagttaacacagaatccttaattggtaaattcggtgtacctataattaaggaagaacaaatcgagttggacagaatttttatgcgatacttattaaacaaaaacatgctgggcaatcaaacttaccaacagttaatggattatgccattagtttatgtcattccagatatgtgttggatggtagagagcaaaattttaaaagaatttcagctgaacaatgtagattacatacatatgttgcagtaatgattggtcaactaaatcacacagagatagatactgtagttaaattggttggtccagatcaccccattaaacaaatggttggggttttaggattgggatctatgcaaggtttatggagtgtgggtttggaatacgccttaaataatctacctgttccaatttcagatgcaatcagtgctacaatagaatggttatctgataaatcactaatgaattaccatcacatagatgtgtgggaaaggataagagtttgggtgtttgagatgaacggacaaagtaacaaatattatgttaacagtacgtggaactctactgaaaatcacagcaattgtgatcatcatgacttgcaatgtgaagaacgtcatgaattgactgagaaaattgaagagaaaacctgtctttgttgtcaagtttataaagctcaagaagatctaactttatgtaagtgttgccaacacagcaataagtgccaccacgtctgtgaacatgactgcactagtcccttagaccatgtttgtgggaaaaaatgcaaacattcaaaacatatatgtaagtgttgcaaagtagccacctgttatgacgtctgtccagtatgtaatgagtcattaaattggatacctttgatagagtctagtagtagacagtctttcacatcaaataagaagagaggtttgaaaaattccaaacaacttgaagatcgtattgtaaccggcaaacaagtagaagttgagaaacatgaaaccttagaaaattctttcacatgctgtggagtaactttaggagttagaggttgtcacttacaaacaataaaagataataaagaaataatcaaaaacgttttgagaaccaaaaaaccagaagatctagagatgtttactcaagatgctttatcagaaatagggttaaatttgttgttggatgatgagttaacacaaaaacctatattaccagaaaaacacactattgcagagataatagaatctacagtccggaataccaatccacagttagttctagatgagtcgattaacacaacagacaatcaaaatgagttgattgaggaatctggtaccattttacctaacgatcaattagttaatgcatggttatcagatttaccccagatagtcagaaatagttgtattacaggtttggaacgtaactggcaatctatcaaaaactcctatgcctctagtgatgacctaccaagaggcgggggtcacatagtttgttgtcctgaaggcatctcatttattggatctagtaattggatatctatagtgaaagaatacgacaacaatgaagatgatgcgctttgtggttggagagctttaaacaattattctcatgaagtatcactaagtgacctgcgaagtagcagtgagagggaagattggtttactcatagagatttagcaaagtattgtagagaaataagcgtgaacttgatgataatgaaaggtaatgacatcatccttcacaaccatgaaccatatgaatcaaagtgttgtttattgatccactcaggaccagaagatagtggacattggacatcagtaagttttgtacaaactagtccttgtcccactatgccagactgggtggggtatacaagtcaagaattcatgaacatgtggttacagtcaaatcagattagagaagattgcaaatttgatgagttgtctgttgaacaaagaataaggtactcgcatttgttatttgtgcaagaagaagaaaacaatagtcaaattttgaaaggtttaattgcagttgaaagaattgataatgattataaactgatcaccaatgaagggaaagagttaaatgatccaaggaagggttttgtaaatgtaaggatacctgaacaatttgtgaatcaagtgggtttgatcaatttggattatgatcaagctttattaaattatgagtacaaccaacctcattcatttgatgagaaaattccagttaattgtagtcaaagattgaaacaagagattagagaaataagcaaacaatgcattgatttaggaatttgtttgaataaacagttgtatagcaaaccagaaggttattatcccattgaaaataaagcaacggttaaaagtataagtgaaggagtttgcagaacaatttgtataaaggacaatttaaaaacaggtgacacgatatgcatcaaacagagagacaaaacttttgtgataagaagggtcaaaagacacaagaaatggatgctcatcaattacaatatgccgggcaaagggggaccactgaggtattatttacccagacaatcactaacctccttaatattgcaactgaatagtttgttaattactaaggaagacaccctaacaactataaaattgttaagtaaagctaacaccattttggcagtccctggttggggaaagtcaacacaaattgcagctaatttcacacctgatacaacagtggtttgcgtcactagtgaagcagttaaaaatttgataaacatggggataccaagaggaaatgtaaagtcagtagaacgtgcaacagaggacagaataactactaaacgattaatagtagatgagtgtacacaagttgactggatgagaatacatgaaatggttactgatagagtacaagaaattgagttattcggtgatagcttccagataggtacagtagatttttcaggctccagtggtgagaggactattacatcatgcaatatgtactctgataacgtaaaacaatttaacagcaccagaagattcggagaaccattatgttccgaattaaagactttaaacccaaacatagataccattacaagtcatgaaacgacgtataatgtagaaaatttgtcagaattgaacacagagagaattgctgaactaattaacaaacatcacataggtgtggtactaactttccatcaattaactaaaaatatattacaaaaatctttgggaaagacaaataaagttaatttaaatgttactgacttttgtacagtgcacagtttccaaggtaatcaaaaatctagagttatggtcatccaacattttttgacacctagtggagtgcacactgataaaagatatttgatgtcagctgcctctaggtgtactaaccacctaacttgggtaaccatagactcacctgtaacttccttaattctaaaagatcacttaaagaatactattctgattggaggtaagggtgacaatgtattggatacagtcacatcaatgattaggaaaaaatataataacataagcattctaggagttttaagaacttgtattcaaagattgcttggagaatatgaacaaaacagagggaacgctgtcatgtttaaggtactgtcactgaggggtcctagagtgagtgacatagctaggggttatttaaggttgagtaacttgacagatgaagaaattagttactacaatttaatacaattagaaatccaagatgaagtaggtttacatgggaaattatttgaaatagagataaaggaagaaaagttggagaatcatctccaatattttgatgatgagaaaccaattgattattacaagaaaacagtaacttattttggtaacaaattaaaatttaactctatgttattaccaggaaaaatagaattcagattttttacatgcactttcagaaatgatggagatgatattaaaattatcataaccactaagtttaaatcatttactattggttatgataacagaataggtggttttaagttgacaaaaatcaccatcccaatttttaatgttttggaaaaatttggaattttgggaaaaataaagcacatcaacccattctttaaaggagcgcagctgtttacagtggaagaaaacaatgaagaattcaatgaaagcttgtttgagagaaatgttaagcaaggaattaaagaatacaaattattaactatgcagagtgctagtaaattaaacaaacacaatgaattcagtgaggtcattaaaccagaagttacaattgaaaaaattagaggaggaaaaatgattagtaaaactgtacagccaatagtaaaaacgaatattagcaaacagagaaagtttttctcttacaaaattggtatcaatttggaacaatacagtagattgaccatagtagcagattcttctaggagattttttagtggtgcttaccccgttatttatattacaccatatggatggatagaatacttaatgcaagatggttgtagtccatgtgctggtttatttgtgagaagggatgaagcttggtggttaatagacaatgattatttgaaacttggttcacggcggatacagttcaatgaagaatgtttaacatgcaaaccaattatatattttgttaaaacattaaacttggagagttgttttacggaagcatatgattacgaactaaaagataatccactggtgacagtaaacactaatggtattgaaccttgggagcaaaggaacaatgtattagatttcattgatgtgttacaagaaagattatgtaatatggatcgaagcactttaactacaaaacaagtagtatgcaaagagatggtagaatataatgaaatttggttgttagacagaaaaatagcagccgcagatgatggaatagaactagtcttagagtttgaccccgataaattgagtgtgttggattacacaatcatgttggggaggctgggcaaacaaggaatttatgtaataatggaaactgataataagtttttctgtcctactgaagaaacagggagcattagtttagattcaaatccaaattggactagagttaaaaatttaaatgaactaataagaatgggtattaaattagcagggaaaaatagagcaagtaaattgacaaacttgctaagacacgtgaacaatggtttgtttggatcaaatgatttagaagatggattaattctagatttagatcaacataaatttaataaaactgcagtatataatcatttatgtcaaagattgggggaattgaaattaagtcaaagtagcatgatcagaagacccttttatcatgggaaaatatcagattcacgtctattgaaccagcttaaaaacgttttaagatgtggtgttatcatggagtgtcctacaactatgggtacctccacaggttcagaactagttatgttggtgttagcacacatggaagtcaagcagtgtacattagttttaaaaaaccctggtttgttgttaagcaacagtctatggcatcatgaagttctttctttgactgagattctagtagagcaagacataccttcagaaagaaaaatttttcaagatcactgtgggcatattattagcaaagtgagtaactcaatgcagagttatacaagtgcaggaaatgataacaaaaccaaccaattaaagtcaacgttagttaaactccatgatgccataatgaatacaaatggcgttgaaggttctagattatttccaaaagtcaaaattaaacaaaattttaggaatctaatagtgaaccattttatactcatggaaccagagaagttaaagaatatatggctagacgatgataatgaaatcacgattatcattccaagttgcggtacaaataatagtttctggtatggaatgtctacaagtgaagataaaaattttgaagtgcatgaaactaatggaaacatttcagctgtaatctctcagaagaagttgagggagttaaaaaatttagataaactgaagttatttggccattataggccaattttcattgccggaagtttatttgattatataattgtcaaaacacagatagaaagtaatacattaagtaaaaaatattggaggacacacccattaacagaaacaatacaagtgccattattaacaactgacttggaatgggccattgaaaataagaccgtaatgaaatggaaaacttttacatgtgataaagctgtattacgtagattagaaattagagccaatagagagggcacgaactttaaagatttatgtgaatttggtagaaccttgttacactcaagagattattcaagagttggaagttgggattcggtggaagttgacgcttttactatgcttacacattgtcaatatgcttattataaatcaattactgggcaacaatcagtgaagcagatgattaacttgttgtccattatagatgataaacctggaaacagctcaatttttaaatggcttaagaaaataggatttgagaaagtatttgctattggatataataaatacaaagaattgattcaaaccataggatttgatttgaccttacaggatagcatgatagagttttgtggatttttggattctttagttaacaataaaaactggactgacaattttaaaaactctgtgacagaatacttaccaaaacagaatttgaggagttgcaccttcttatacaaagaaaactttgatagagatgaatcaaatgtgggaaaaatgcttggaggaattcttaaagaatttgtttggcaacccttaaataagggagatttcaatttaaaagacattatgcttaaaggtttaggaatagcacccaatgttacaaaaaccaataatgaacagcaaaatttaaaaaattcagaagaaacatttaatttgaactttgaaggattggaaggactattgacaccaatagaattacaagttattggcagacaacctacattggaaccttgtattaaggggaaaagaaatttattgattgttagtcaagggacaaggggtgatgtagaacccttaaaaccattgatagatgagtggagtgaattattcataacaatttacgtttgtatcaaccaaggcaacgaagagagtgtaaaatggaatgataaagttaaagttgtatatattaatatggatgggtcagatttgagcaacattgcaacgatggaagttgatcaattatcatctactaaattgcacatgttaaagcaattaactacgggtttaagttcatcgttcaaagatttgttaaagttggataacataggattagtgatatccactagtcatactgtattaggacagttggtagcaaatgcaagacgagtaaaacatgtcaatttgcaattatttccttgggcagttaagcccaccgacaagtatatgaagttggttctagagtgtgtttcaagagtgttaaatagaactgttgacaccgggtgtgaaagtatagcagagctaactagggaaacaaatttaaatttaattctttacccgccatctattttgaacaccattcctcacggtattgggacgaacataaaattattgacgagaaatttttcggaaaagaaatgtcgattgacgacaaccaatgaattgatcattacaatgggttctattgttggcaaggaagctttatctagatataaaaatggattattgtgggcatcagtaaacaaaatgagaaaggtttacttgataggagctcaattttcagagagacgtggtgtggaaaccaaggagtgtattgggaaaattaaacgtaaattaaagagaaacggggtaggaataatcacagccacctatttagatttttcagagatatcaagtaaacacacaatagtgattcatcatggtggtgcaggtactagcaattacttttccaggttaggcattaagcaaataattttaccaatttttaatgatcaatggttatgggctaactacctccaaaaagaaggattttgcataagtagcacaccatttgggttaagaaatttgaatttgaatacactgatcatgaacactaacccaagtaaatgggcaagattaaaccagatttcagaacctacatattatttaaataacattgacttgttggactgggtgaatgaatgtgatgataacacaaacttcatcaatttgtggccatacattatagagtcaataaaaacaataagtaacaacatatccgacaaaatacttagtttaccacccttgaaattaatgttagaagttgcaacttgcataacaaatgtcaccaaatcacaaaccctggaaacggatggagcaatcgatgtcatagaatgtgtggacacattcgatgatgtcatagaaataccagataagtcacataacgaagaagaacacatcacccacccaaccattaacttaccaactcatatatttaaacttgtaaatgatgagtttggtgttgatgcctggaactctggaattaaaccagttgactcattaaacttgagtgatcaatctattgatgaattagaaagaatcactgttagtggtggaagtgatttcgccaggtttaaacaaaattatattgaagctggatcgggcataattgagacaattggaactgaggcagtgcacagtggaaatggaggtttaggaaaatttgaagaattagagaatgaatcaaaaatcaatgaagttaaattaggtgaagtagacattagtgagaaaacttacatacccataaaagaagtaataatcaaggaaaataaagaagaaattactgacacaggaaggtttgaagtaataggtgaaactgactataagtatagcgtaaatgaaatactggaaagtcaaagattagcatacagaggaaaatcagatgaaggatttagaaaggttaaaaataaagatgaaacagtaattgtaagaaaaccagagaataaatctgacagcataaatttagaattggctgaatttaagtctgaagatgctgatgaccaattagtttacgcaaaagggggttatactgtttctaatgaagttgaacaggtgaacattaacgaatcacttttgttagaaagcgaattaggagaaggtgtcataattgggttttgcaaaccaccattgagtttgaactctgtgatggactggcaacaactattaaacatagaggaaagcaatttaatacaaaacccctactgttgtaacccagaacattctactattgatgggagtgatttaataggtcaaaggttgcagaacacaaatacattgtacaacccattaagtgatggaacatgtacttatgattgcttatattggatattcaatggagatggaaatggtatcttaaagacttggggtgcaatattccatagcagaacatgggcaacaatagctgacatcagagggttttcttatttgagtggaatctcaatcattgtgcaaacagacaatgaatgtttattcttgaatcccaaatgtttacctctttttgcattgtctatggaaactaaagatggtttaggtcacacttctgtcattgggtttgatgtagatgaatttaaagagaaacaatggattagattagagaaaccacttaaaaatgcaaatttagatttggggcctacttgtaagttgagatcaatgcgttatttaggtacaagtaattgtaaaaatcattgccatatcactaaacaaaatttaggtattattggtaaaagtttgaattttaattcaagcaaagaggacattgtaagatggttgaaaatagctagtttaataagtgggaaaacaattaaagatatagcttctaggttgaatggcagaaactggtcaaaattgcttaataggagaaaaacccaatttgtaaaattggtcgatcaccagtatagcaatggttgttcttgggatttgtataattgtggtttcaaaccaggtgatgtattgtgtgcaataaatggaagtaatatatcagttggcgtgttaataaatagaactaatgatttgtttctatccacttcctctcaagttacccctgtgcaattagttatgagtttgagcatgaatttatcgcctactccttataaaattccgaaacgtataaattacgttggtgaagttaagagtttcttcttaaacagatcttctatgaattattgtcattcaataggtattaagacagatgtcgacaaaattgctgagttagacattagcatcgatgaacttttaataagtgagtatgataacagacaacatcatttaatgaacgacaaagaaatagtcaaacaagtagaagaaagtaaaatagttgtaataggacacgcagagagaatgttaagctgtaaatggattaaaacagatagtaaaatcagacctgtgacaatacatggaaaacagtacatagagtgtgacacagaatgccaactaattttattttgtttagataaaactggagagagaaaaaatttacagccttcaggatacagatggattatcaatcaagagactttaattagtttcagaatctgtgacaccttaggggaattaaatagacaattacagtacactgatgataacaaagtcgttttaacgcgggttaaattcaacatggctggtaatttggtaaaacaattaaagacatatttgattaagaatgggttttccgaagaaggagaaaattacataatggaattagaatcagttatgatgagcccacaaagtacttgggatgtgtatatagacacacataacattaagtattggttggaatcattaaatgaaaaaattgattataaaatggataaattgtattttgtaaccaatcaaggtttctttagtttaataggaccaatggtcatcacaaagaagaaactattgaaagatattccggaattggtaggtggttattcacaaatcaaacaactaggtagccaaacttgggatcacagtatgcaagatttaatgaagacaacttcacatgtaaagcatgggttcaagtttaacttcaataatgaaaagaagattcaatcgagattgacgcaattaagtaatcacaatagtcaacaaagattacacaatgtcatggatttaatagataacaatttgcaaacaaaggataacattcaacccatcaacattaccaactgggagaatttagctatacaagaaggatttgatagcattattcccaaacaaataattgacactaaattgaatagaaacataacaaatgacagtattcaggaggtccctatccacgtcaggaatatgtgggatgatacagaactattaggttggaatacagcttacgcccccactaatgatttaaaattgaaagctcacataccagtaggcaaacgtagaactgaaaggaaaataaccatgtgtaaataccctatcgagtctagggtagttttaacaaaagtggccaatcaagagtttaatgctattacaggtagggttggaaatgctagtaagattagaaaatatgatttaaacattgaatatgagattaaaaatttttgtgaggcttatttcaaagaaggttggattgacatagttagaggttaccaagcaaaccctatttatccaactggagaatcaattttaaaatggctattggagaaacctgactgcatggacattgattccgagttgaaaatgtacatggaggatgggtttttgacccatcctatatcagatgtaaacgttcatttaaaattagaatcattgttaaaagacgagccagtcacagtgaatgaagcattgaaagctcgtgttattatatggcaagccaaaggtatttgtgctatgtacagtagttcttttatagaaataaagaagcggttgaagaatttgttgaggccagaaattatttatacagatggtatgcaaccacatgaaataggaaataatatgaacagtacaggagaatttgaatggttcttagaagacgatttaacaagacaagattcccaaactgatggacaaactattaatgttgaattcgggttatatgatttattaggtttgcatagaggtatagctagttcttggagaagagtacatgaaaactggagatttaaaggtaaagatgtgagaggaatttggaaggaaatgagattaacaggacaggctacaacagctttaggaaatgccttggttaatctaaccgtgcattggagggtagtgaaacaactaggtagaaaccttaaaaagatgttgattttaggtgatgattctttattcatgaacaccacaacgacagactacacttcactaagaagaaatatagctgactactataacatgaaatctaaagcttttcagtacaaaaatcatggaacattttgtagtatgatagcctacagaaataatgacaattcatgcggtatagggcctgattatgtcagattaaaaaggagatttgaaatacccagtggtgctagtgacggaagtttacacaatattattgctagaaaaatgagttatgctatgatgttgggtgatttgcaaccagtaagagagatagtagagacaatgaagtggcctatagagctagagagttggtatgattatggttcattagtggatgcttgttctagtaagtatgatataagcacaacagaagtagaagcttatttaaaaactctaatagattatttaaaacaagactttatgtttgaggttgaatttgatgttattagtcaaaggtaa

SEQ ID NO: 1200 - DNA, 13518 bp, Brown algae endornavirus 1
  source 1..13518: mol_type = other DNA
atgagtcacacagtagcacatagacacaaaaacacaacccaagggtcccttagggaccctaaaggaactaaaaagataagatataaacaaggtctttcaaacgacactactttattgatcgggaagcaacaatctttacaactgagcaaatatggtgacaaactattcaaggatgatataattgctcaaccaaagggtaaagtacaaaagaaattaacaagtttacgagaagttttcaaaattaacaagaagcatggtttgtacggcagaagcaatctagattcaaatacagttatgtgccccacagctatatctttaaaatcttttgaaacaatgaactacagtgagcaggactggtcagaagggttcacagtcacgcaattagttgcgtggcaattcatgatagatagcaacaaatcaccatgggctgtaaccgatcaagagcgtgacagattcatgcaagaaatgtgtttggcaacaggtaatttgaaacttgtggctagtgcaaaggcagccgaacaaatgcgtatacggcgaactcaaccaaagttgttaccagcatttgacatcgattatttatgcatagatccacaaatggatgaagaaacctacatgcccgtggaaaatgttaactgccctaatgctgcattaattgttaaacaagcattcaaactaattgattacaacgtcctaaggtctttgtacatagaatgggactcgtgcgcttctaaattcacagaagtgaacaaatttaacatcaatggtgtcacaagttaccattgttgtgaagatgaagcaattttttaccagtgtaaaaattgtaatgtggtaaacagggctatagataaatcttgtacatcggctaaatacaatcctggactatgtggagtgtgcttccatcatttggagtttgattgtgatgcaactgtaatcatcaatgatgtagtcaaaagcttacaacaggtagctacatggagtgtgggggcgagttcgaagttgcatgacttaaccctggctggatatttagatggatctcaattaccaaataaatcgttggaagaacacatggctagacacgacgaacgattgtttaaccaagtgcgaacgaagtggtggttcgaaatagctgaaattccagctcatacttccaatgattgcaaaaaacacttgggaagaagattcccgagtattttgctgaagcaagttaacaaaggatcagcatacaacgctgacgatgctgcggagtttttcgtgctatctaaaatcatgcgtggactgaaatctagtaacactaaagctattgtggaaaaaactattgatcgcaattggttagtagaaaatttggacaaattgaacaaacgtgaaaatttactgttgttagtacataaaaaaatgttaaacttaggagaaggagttaaaacgtatgagtgtgatgctgtttatcctggaccggaacatgctgaagtaatgcgtcttaatttggatgttattagggcattgaattgtcaatatgtaaccttaaacaaaacgacataccgcattcaaactgtaactgagtcagagcactggaacttgatatcaatcagtatacacaatggaacgcgtaacaaatatgtcatcaaaaagaccgacaatttggtaaaaacagcgagaataccgtatgtagctgtaaaattattagacatgctacccattagtccgatacattcagaagaattcaccatcgaacacaacttgttaagaaaattgatggtaaggaatatgacaggattaatggatatgactgaattaataaattatggtcgtgctttggctcaaaccagaatcacatctggaaattttgtcagccagccttataaatacacaccgaaacaaataatagaacattcatacattgcatcaactataatgaagaggttgcacagtcagcgttaccatttgacaaatgatgaattgctcaaccatttggttgcctcgggaatgcaaatagcaagtaatttaatagacaacaaattaccaaagttcaatgaagttagggaagttttaaccagattgggatccaaatttagattaagtataatgaaggatgtttaccaaaacccggtttgggacgatttatcgaattgggcatacgaagtgggtcttgaaaatgcaaagatttatgatcttggtaaaccatcaaaattgagtcaacctgcttcttgtaatcatcacacaactaattgtgaacacgcacaagtaagtgacatgtattgcaggtgttgcaagactcacgcccctgagaagcattcatactactgccattgttgcatgccggatcaatgttcacataatgacagttgcaatcacaaatgtgaagggcagtttgagcatgttggtgacaagatttgcaagtgctgcggaaaaccggcgcctgtcgaactgtgttcaatgtgcaatgacaaatctacatttaacgaagaaatgtcttttgtacctgatgttgaattcactgtaaagcataaagttaagaaaactgtgttcaaaaagtttactactaacacatctaaaaagcaacaaccaaagcctattaaaacgcgagttcaatttactaaatcggaagatccagtaaacagtgaagacaagaagcctgtgtcattagtagaaaatgcagtggagaccacggtggatgaaccctggtctttggtcggcccatcagttgatgaccaatctttaaagcatattttaaacagtgatgaatcaacatttattgctaacattcaatcgttattagatgaggatgaaattgtagcatgcaacaggtgggatggtgaatgggaaaatgccataaacgaaataccgttggcatctggaatttcgcatttagtaagaatgaagccaggaatgtcacaactgaatcaaggaaagtgggaatctataaatgaaaaagaggccgaagttacaaacacaggcgacatttgcggttactgttgtatgaagactatgaataaggacgtaagtttgaaacaattgcaatctgtagctaactgtagtggcaatttctcggcattggacatgttaaaattgtgtgaaattaacaattggaacatggccatagatgtggggcactcattgctagtaggctgttacaaccctgggcatgataaatttatgaccatcaagcatattaatgaaaatcactgggtattatgccaaattttgcagttggggtacagcacagttggtccacactttgatgaattagacgacaacgaattatctaaattaagcaaatcagttttagatttaaggtcggacacaatggagggtgtctcaacagtagcgaaagctctcggaattgcacggtggtacttaaaattatcaacctcaccgctatacaaatcccttggcaagttagaagtggtcaggcaacaagataagtgctttttgacaaacaataacgaacacaagcatgaccaatacacaggtttgatcaatttagaggtgccaatgtcagattggcctacattgagtttactaaatgatctgcagaacccggacaacttaaaagaagccgttttatcagcttaccatgatgtacctagtaaacctaccaacaatttaaaaccgttacgcacaactgaacttagttctgcggtaagggatttgttacaatacataataaatttggactcagacaacggagaaaagttaatttacaaaaaacaaatgttaagagctcacccaagaaccaatacagttaaaatctccagtgtgaatgacaaaaccaaaccaaatgacataatcgtaataaaatatgctggtaaaacttatctaaggttcttgttcaaatcaggtggacactgggtaattatgccaggcgagtttgcaaacagaaaagtgtccatagcccaaacaaagctaagtgtcggaagcatgttactaagaataacttccgtaataaacatgcaattaagtgatgtggaagggctgatagaatcagctattgtttattacggtgaccctggaaccgggaaatcaaccaaattgattgctatagccaatgaggccaggtcttatacggctgtgactctgactaggccagctagagatagattggtatcagctggactcaactcgaacaatgtaatgactctagaaaaagcatcgataaccaaaatcaacacagaaatattgttgatagacgaggccacacaagtaacgtggtttgatatcgcaaaattaatcacaactaaagtggtgcaattgtatatgtttggagatacagcgcaaataactaagaaagactttagcacaacccctggtacgagaacaattgaacccgctatcaatcttacaaacaacaaacacaaattaaccatcaatcataggttcggtggtgacttgtatgaggaattaaagccattgctaaatagtactccatcagacaaagcaccccacacggaagtaattaagtacagtagtgaggaatttgaccgcagtaaattcacaaccatattggaaaatgatttaccagacgttattattacatttactcaacgcactgcatccattttacgatcagaattgtcaactttgatggaacccaatgatcaaccagaagttgttaccgcacactcataccaagcaaatgatgcaaacaatgtgctggtaattcaatgggaatcttctggcaactcactaacaggtgtcacaaacatgcccgaatacaacttttcggcagcaacacgcgcaaaaatgaagttaatttggtggtcaatttctgggcacacacaagacgtatcacttgcagcacggattaatgacgacttcaggggctcagggttgcaccagctgttaccagatctgatgttagctctaacagactttagccaaaaaatgcatttaccagaaataggcacagaagttttaaaccttatgcctgagaggttagaaaagttgcaaaatctttgcgaaacagataaaccagatttgaccacacacgatgaaaacatattaagatttgatgtaatggctaacgaagataagttttctgattcagagtctgatggtgacgatgaccccgtcgcacaacctgttatgattcaaaaacttaacgttcaagtagccaaacagcacgcccaaaagcttgtaaacaagtatggggcaacattaaaattttcggaaagtgaatcgcaaatagatgtccaaataattgacaccaaattcaatagcgggttggtgatgcatgctagatgcgggaaaaattacccgtttactgttgaattggtacacatagccatgatagtaccactctctcgagggaaaattaaacgtatgtttactgacataatagccatgagcttgcaagatgagttgatacggccaggagacccagaatttaatgactttaaggacggatcacatgtcagaattataccaaaacaagaacctttatgtgaatacgatgtcatgcttccttgggcagtgggcatcaaatttagggcactagcccacttgaggtttttgttgccagaaaatcaaacgttggaagttagaattgacaaccaattgtttgttgtggagaaaactatgggttgttcacagtactgtggactcaaattttacaaagataaagttttgaaattcatcattggagggtcccacaaggcaaatttgcgaagaaatgtgaaactatttgattgggatagcacacaccctagcaatgagttgctaaataacagcaacagctttgactgtgagttgaactacaatttatatgatgtgaagctggacttctgcttagcactcgagcgcatattagcttttgcaaatgctggaaaatccatgttgttgaacaagcttgtaggtaataccaaacaaccatggtcaattatgactacttcaaacaaaaatataaatgacaggctagaaaaagctgtaggaacaaaacatatgccaggtgaaatcaacaactacataggcaactgtattatggagtacagtggaaagttgctaagactacaagacccccacgatcaaagatcaactaatatatctcatctaaaccaattgttacaaaagtcccaataccatgagaagcaaagaccatggttcaatataatacaagaaatacttggtttaaataagattggagccctgacaattaaaggcttgtacttgagtgaagaaaggcacaaggagttgagaactcctggataccatttattaatggataaattatctaacgccttaaaacaaatctatgacacagacgataccccactgtggttaagtgttgaacaaatcaacacatacggccaaactttgcgcgaagagttcccaaacatgcctttgtgtcctcacgcctatatggaaaattccagtgctgaaagattaattgaatctgtcatttacttcaggggcaagcaaaatggtttcagtcaatttgcgttgagccacttttccattccgatgatgaatagtgatttggacagtacagccgtgacaatattggctgcgccaggaaatgaaatcaataaccacctaaacttggcgaaagaaaccatcaaagttttggaaggtaaaattcagcaaagaactgagagcaaattggagagtgaccaattgcaactaaagttaagtaaattgcagaactacacttcgggaaataaaacatccttattaacagattacccgtacgaaaaaccaatcgttctaggattaaaatgcatgcataactcattagaagacttccataagctgctggctaaaacaagacagctagaattgtggttacccaatataaccaatgtcaccggaccttacaaccattcagtcaaagatggattagatataatttattatgacaattctgaagacccgattcaaatgtcaaaattgtgcaataccattacaaccgaaactcaactaattcacacaacgtcagatggtaaatacatattcttcaagccaacagacaatataatgggtcataatgtttacacagttgaatatactgtcaaacctcaactatactgtagtgttaatgccacagtgccaacgaattccattaagctgaccctgccaatagtgtcaaatgtgtcagaactaactagaactggaaaactaatcagaatcaaaacatttaacttcaataagaatttttacgaaaaactaatgtacaagatgttgcaaaaagatataacatttaaagagttaatttattatgcaaggggtttaactcattcctacatgtacagtgcgactggttacaaacctcagtacaatgtaaatcctgtgtctgtggtggacgcttgttgtgtagcttacataaaagccaactacttaattcaaccttttaaatcgtacgattcaacggattacttagctatgctaaagaatgcaacccaaaaattacacagttggttgtcaacggacggtacggacatgctaaatgacaatctaaccactttagcaatcgataatgataagttagccaccattattgacagttgggtgaagacatcaactaatgaggttaaaccacataacagaacagtttacttggcaaaattggatggaaccaatgccaatttggtagacatgcataaagttggcagttggtcctgggttgctaaggagtttagtcgacaaagaaaattaatcaaccctgtccttaagaaaaagttgttaggctttgctaagacacagttcgatcacaaagttaaccaattactttccgtaaaacgaatcttgattccaggcaaaccagaaccggtcaaaacaacaacgatagaaccttcatcaacaaaactgcagattaacgacaccggattccttgtaacacattgcggtatgggtaagaccacactggccaatatgtcaaatgctatagatgctgaccaaatcctggagtctggaaaaactaatgaccctgcatacttagctgcttactggcagcgtttgtacgaattgagtaactcaaatttagtcatgattaattcattgggtctattcgaaacaataaaattgtacaataaaaccaaattgagatgcattgcaattctgccaagatatgaggtgcagaaagatttagaatctcaaaaacagtacgaaagaatagattacctgaacactcattataactccctctcctcaacaaaacaattcttcaccaacgtgacgtcagaaagattaatagccaatggtaatttgaacattaagtcccaccccaaattaaaatcaaagttactcaaatacatgattgaagtggtatgtgatatgaacccgcagcaatcacaagtgcccagttgtacacataacatgttagaacttaacaacaagaatcacattgttaaaatgcaatacaagccaactactgatgatgaacacaacaaatcaattatttctataatggcaaatgagttgagcattgatgatactttaaattgtacattgtggaatttaatgaataaaatgtatggatgcaaaaactttaagtcaaatactctagtgttgggacgtaagggtcttgttttggctagcgacaatttgcaagaattaaacgtgttgcgagcatacatcatgacttcacttgcacatgcatttgatgaaacagaatttaacgataatgacaaagttattccgggggttaatgatgaatctccggaagaatcgaattcgagtgacggtgagtcacataccagcaatgacgaaataattgaggcagtgaccaatttatctgacaaagtcaaatccacaacatacggagccgtgagacaacacttcccatcagaccatacattaatcttaagaaagaagagaattttgtttgtagcttttggctctagaggcgatttagaccctgtcatattgttagctagtgccatgcaacaagttggtgctcacattacaattgttagtcattccatatataaatctgaactcgaaagcttgcattttgaagtaattgaaataccaacagacccgagacaatcactgcgcatattaagtctggccttcgacggtgatcttcacctcttaaaagatattttaaaagaacacatagggtcactaggtgcggcaataccaactttagagtccatggcatttgacctcattttggactgtccatttgcaatgttgggttgtgcggccgggtatgcacacaacaccccggttatgtttttgtgcccgttcttgtttgaattgtgggacactccagaaggaataaggttgcactcaatgttaaacaaacttggtatggtttcaaatatttgcaaattgatggaagctcatgataaaaattttgtgtacgaagaactggctgactttatagaatcgaacaataacatcatgtacatgtgctcagaatatctagtagaccctaaccgtttacctgccgggcatttaatcacagggccgtgttacaacaacaggccaaatgcatcaattcctatcattgagagcatgtttaaagaaaataaaaaaattatagccatttgttggggttcactcacccccactaacaccgataaaatagcagatgtaataaaagtggtcgtgtctatgtgggatttggtggttgttacaggtgacacgacggcgactgatgcgtgggataataacaatattattgaacaacacttaagtggtcagtctgtaatagacaacttattaattataggatcaatagggtacgattatttgttcccacgatgtgacactgttttgtgtcatggtggagcaggtaccattcaccgtgccctggcccacaaggttaaattattgatcactccgttcatgggtgatcaattttactgggctaatatggtggaagaactgggcctaggttgttgctcaatggacttgaattcaacaaacatcaaggcagcttgtcaaaggcttaaacaaattgatatgactaatttttcagatgatctcgtggaaagttgtaaaggagatgtcaacaataacttaaatagtatcgtcaattttttcaataataagagaaattcaacattaacatatgaaggaccattgggattctgtaaaatagaatcaacaataccactgccaagactttattctttgggacattggatttggagtggtgaccatcaagaaatatacaacccggacgtagctgggttttgtttcaaggaatgttttgaagattggttaaagcatggttcagtgcgtgttaatgattatcaaagtttatcacaggtaatcaaattagaaaaatatgtagaagtaactgatataataggcctgagcatgttgtgcaaatttaacttgattttaataaatgacgtaacacagcagaaacacatgtttatcacaaacccgctaggacctacgattgggttaaaaataatgcgccaaggtttattatcccactgtgtaagagttaactttaataccaaaaatgcagatcaaattatagacgtcccaagacgggcacccacttcaatacctgaaaccataagattttcagatcataatgtaaactctaacataaccatgtcaataaatgaactcaaagacacagtaatcaatgtatctaaacttcaagctatacccgctgaatcggatttagctaaagtgctcgctaaaccaattaatattttaaatgcggaatttaaatttaaaaatttgtaccacacaatgaacaggcaagccaaacctgtaacattttacaacactttctcaactcgatacgggtatgtcataagcaaggtggtaccgcatctcattaaccggtttgtaatagttagtgacgttgaagctagacgagttatgttatgtataaaattggaaaactgtacagttttattgggtgatcagccaaacgcacattgtgattatatcgcagtaactactaccatgttaaaattaccagaattgaaagtcaaactggaaaagaaaccactggacaccaataattcaatcataaacattaccagtcgcaattatttggagaaaaatgaaaaagtgtcaaattggccggtcggctcaactacagccaaattactgcacatttcacattttgataataggacacatcatgaagtggaaggaagagttcaggacaagcaagtttttgatcattatgtaaagcaaactttattaaaccctgacgtgagtaccattaaatactatggaagagtaacaggtattgaatctaaagctttggtgctgccattaaaatctatgcgtattgatttctgggttggactgcgcatggtggtggaaacagacaacccacgaatacgcgactacctattaaacgaaggtgtttggaatgatttagggctgcaatttaaaattaaacataattatgtagtaaacactaaaaacaacacgttaaacaacatgcggatcgcagattcaagattatcacgtatgtgtgaattgactgggaatgtcactaagatgcggcaaccaccactagctcttgggacgcacaacatagacaagcaacggttcacagaattgttcagagcacaggagatagcagcagaaaaattttggacatctaatggttgctcggcattcggagaagaagagcttatggtcactacatttgaagggactaataccacattgaaggccatgaaccacacaggagcaatttgcatcaattgcaaattgcacagtgtaactgggttaatcacagtgtccttggtcgacaaaaaaggaggagtcggcaagcatgaattaatgaacaaaacagacggcataccagatgataaagatgtagaccacgaccacaccggtcaatcaaccgggatttggtcacaaacaagtgacgttaatccaacaaagttcaccaagtggtggaacctaccagagtctaaggttaataacatgcccgctgataatttgtggggtttgaaatctgccgatgtcctaactgacacaggcttggaatctatcttgaccaatgaggtgttgaccggcgacgacaatgaatttaagcaagagttgttagtcaacattgaaccgaataaaactcaaacaacaaaattttctaacactgattttgacgaaccggacgtattcagcgtaaatttgtatgaagacacggatctaacagatcacaccgcaaaatatttaccagagaataatgtaagaataaaatgtagggaaactgggttcaaaaccaaattgattgaaaaatccataaaaactaattatccagtttattctaggcccgtgttgaccaaattaaataatgcagaattcaacgcagtcactggccgtctagcttcagtcaaaactgttcgcaaagtaaatctaaatgttggtgaagaagtcaatagatttgctaacatatattttgatgaagacaaaaggaacctcttgaacagttacaaaactgacccagttggttttgattacactgccatcaaagcatggttaacctctcgaccagatgccgtgaaaattgcggccgaagtagacgcaataatggtagagggatttgaaactaatcagttaaatacaatcaaagtacatttgaaactggagtctttgttaaaagaaaatccagttaaatatatgaaacaattgcaaccacgtatcatagcatggcaatctaaaggaatttgtgctctatatagtcattgctttaaaaacataaaacaaagattcaaatctatgttaaaacaaaatgtcatttacaccgatggtatgacacctgacaatttaggtgaacggtgtcgaaatgtacaaattaagccaacatacaactttgtagagaatgatttgacaaagcaagacaggcaaaccgatcacaatttgattgactttgaaatggccatttacattaaattaggtgcagataaaaatttgatagaatcttggttacgagtacacaaaaattggagagccaggggcacatatattgtaatgcacggagatgccatgagattgaccggtcaagctaccacagccttgggtaatgccattgttaatttgatatgtcacatggatttagttgaaagactgtcaacaaggttaatattaatgttaattttgggagatgacaacgcctttttggtggacggggaaatagataccgtgacactaagacgttggatcgcagacaaatgcaacatgttcagcaaagcaaaatcttttaaaaacgtatgtcaattttgttcaatgctgctgtacaaaactacagatgaacgtttggaattaggacccaaccttgtacgcatgaagaggaggtttgaagtcaccaatggagtgcacaaactaacagacaacaatgcagagatgagggccatgtcatacgctatgatgttgggaaaagaccaacaactggacgagctggtaaaagaatatgaatggccaatcactactaccacttggtatgaccaactatccaatttgcaagctaatgccgagtataatgaaatatctcaggagcaagtcctcagttacaagcaaaatttaatcgcttacttgaaagaattcaacacctacaaatcggtttattggacagtagacacagaaaaaagataa

SEQ ID NO: 1201 - DNA, 12507 bp, Brown algae endornavirus 2
  source 1..12507: mol_type = other DNA
atggtaaaacgtagtaatataagtaaaacaatgtcaaataaaaaacaatacacacacacagccagccgtgagaaatcacggctggctaaaaatctggatgaaacaattgaaaatgtttcgtccagtattggagttagcttggaagtacaatcaactaagaatgtattagaaggtctaacccctttcaggcgtaatgttaagttaattaagcataatgcacctgtctctgctagaaaactggttcgagaaagagctaccatacaattgtcacaaccgcaagaattcataaacaaccccttactagacaaatttggaccacatgtttacaacttaagtagaattacacctaatttaatcaaaaagatgatgttcaggtttaaacatgacgagctgtatgttggggaactaccagtgccactgctattgcaacaccaatacattgattacccttgggggagcaatcaaaatgatgcagatggcacaaaaactccagaaattccttctggcccagggaaagaagaattagagatgtacatatcttgtggcatacctttggaagacctaatacctccgggggccatgactgaggaaactaaacccttatttaagaaaaatggagaattgttgctaacttcggtgttgcaagatattaattgcaggttcggctcaatggaaaattatgttaatttatgtgaaaccaatcggccatcagggattcagccagcaaaaattgacggccattacgtaactaacacttatttgcctagtccagtgcatcaatgtgcttgttgtggaacttacaacactatgaacaactactctgctccggcaaacttagctaaagcttattttgatgaacaaataaaactagccgaggatggggatgttaatgcacaaatcgttgtaaagcggagaggtctagatgcttctttcatggtacctgacgtattgttaagtaattatgcgtggaaagatatcacacccggaacttggccccacagatcagtgaatgactatgattacaccttcagatgtgccaattgctggcacagtctggaagtaggcattgaagaaattcatgaatgcgctagttatacagataggtatcataatttaatcgacatgagaggcaatagtattttggaccaattaataacgactggagttggagatatatatagtgatttagctgctgaagatagaacaactttattgcaacatgacgaaaatattgtgaaaaaatatttgcgcactatcagccatagagtgataaaagtgccaactaatttggacccagcttgtcattccaatttgaggtcgcactacccaggatacactcagaaattaactagtaacatgtttgctgtgaagcccgaattgtattctgaactatgtatggccgcagcttggctgattgacaggaatccagatggcaattaccgcctagattccacctcaatcgatcttgtagacaggtcaattatgtacaccaatagacaagaatggatggttaaactcaagaaaacctctccagacttcaaaagtagaccaatggtcatattaggagaaaaattgcgtgatattaacactgtatatgaattattaatgcaacaatcaatagtatattactttataattaaacgatctagcgatgccttaatggacggcactggcgccacatacaccaagtcgaatataacctccatttatgttgatggtaaaacagatccattaactgtaaatgcttccacttatgagttgttggagactaatcaagccatacgagttggagctaatataatacttaacaacactttgttggatggcattcacgtgaccattggcagtttaagtctagataacagagtaacactaaccaacagactatcacaaatagatgatcaaactgcagtaaccatacctgtgcctgacattatgtctatagaaggaatcatgccaataattaactggaaacacaagacttatagtgtaaaactggacttgtttagaactttatgcattcgcaacatggacggaagagctaccacaacgcaattaagacagtatgctgttgccttctcaaacacagtgtacaatgtaggggaaaccagaataactaacagacacataacttatgatgacattgatttccatgtggcttgttgtagagccatgatgatgcatgagaatcaagttgccgacgcttccatggcttacaataaagttttaacttgcttaggacctttacgcgcccttctaccacaattgactaatggattaacagggattatattggaaactttaactagagtagtagaaataataatggacaaagcaggagctgacatagacacagtgttgtcaacagttaaaactgtgaagttctttaacgttaacgccctcgaaaacgtttgggagaaattaaaagatacatccatcaatgcacagttgtcacctctaagagtttcaaatgccgaggttaccaaaactgaaaacttcccaaattgtgtacatcatagagcactaattaattgcatgcataaaggggaaaataattgcaaatgttgcaatttgccgcacaataaccaatcctcattgtgtgattgttgccagcctgttaaattaactgtagaccccaacaactacaacatgtcacaacaagatgacaaccctggtaacaaaaacctgtctaagtcaagtagtagtaaacccaattctaaatcaaaacaaaagcaatcaaaaccaaagcaaaataagccaaacacatctactaatcaaattgagagcagtgctgacaactcagaaactaagcaaacctcgacaacccctgaaaaaccattgattaaattgacaaaggaaaagttgaagttagacgtaattgatgaagaagcgttaatggtagccactaatgtgccaaaaatgtttgtcgacggattgcacaattacccagaactaacatcaaagatacaacccgcaagagaattgcaattatatttgccttatatgttagcaggcgaaaccatacttaaaaacaaggaactgaaaattgtcgaactgataaatcaaaagaacgatagcattaacacatgtggttataacgctctcaagtcagcaacagatgggaatctcgttatggatttggatagtttcagggaagtgacaggctgcaatgagaatttcagaacggatgatatgttcagatacatgagaatcaaaggggagaacttaataattgccattgggagtgagttccatgtttcaaggcacaacaaatcagattactactattgtgttatccatagtagtgccaccacaaaaaatgatatagatcattattatcacggtaaattacaagtaatagataaacccaacacagtactcacatcaaattttgagttttcaaccagcgaattagaagtggttgcacaaagtttggggctcaattttgattcttttgtgtcaatatctatgccggccgccgacaatctaatgttaatagcattggcacaggcttcgagagccgagtttgatcacgaaacaaacaccataggacgactagttagcgtgggacaagatgagtattggcaattcccaatcaataaccatgttaacaatgttcaatccggaaaaatctacaaaaaaataaggaaaacaaacagtgctataagaatgttaatagataattatgaccaaccatcgagtcaacaaataactcataaagactcaggcatacctgaaaggttagaaaaagcgattgatgactactgtaattctctggctcattcaataaggtattgcaaaactatgttatatcaacaagacaaacacaagtatctcaagtcatactgcactgtcgaaacacgccaaacaaaaaacggcgtttggataagtggagctgatgcttcacttaaaacatttgatcattgtgctattcaatacagatcgaacaaaaccactattaataaaatcgctatggtcataggttctaggggggatgggaaactgtttttaagtgtagatggacaactaccaaccaaagtcagagtggcagctttaaaaataagttctgggtctgcaataagaactttaatagctatgtctggcactttaccagatagagaagagttaacagaattagtgcgcaaaagcactggaatagtaggagtgccaggaagtggaaaaaccactacaataatcaacaatgtaaacgaagaaacattagtagttacaatgactagacaagctagactgacgttgtctaagtctatatctggcataaagccaaacattaaagtgatcagtgctgaaatgttgctcaattaccctctatccaagtttaacaaagtaattatagatgaggcgactatgttagattacacatatttaatacctatcgctaacgggaaaatacaaagactagaagtatatggtgacaatggtcaaatcgggtttgtagacatgtcaatggatgcaggaattagggccaccacaaatctattaactatatgtcaagagtatgggaacatagaagaaagaaatgcaacgtacagacttggtgaccctgcagtatcagaactaaaagcaataataccaaacttttcatcactatcaagttctaaaacgagctggacttggcttaattgcgctaatgacgcagaaagaatagtgtggcatattgacaatcaccaaagtgacctaatattaacaccgtatcaagaaacaaaacaccaattagaacaactagtattaacatctacgagacgcacaactagaaccatcaccgtaaacaccacacattcatcacaaggtttggaagttgagtccgtaatggtggtacttaaagcaacaacgggaggacaatggggcttaaatggggatgccaactatttggcttctgcattaacaagagctactaagcaagtaatagtgcttgtaataggcagaccatcaataactaatttaagcgaagcaacatctaaattgggagggtcagactgtttgttatacactgtaattgatgaaatggaaaaaggcagcagctcaaaaaaattaacagaattgatacaaaatcacgatatttcggtagaatcagaaaagaaagacgatgattatcacactactattaaacacaaactgggcaacattaaattgttaataaccagacagaaggttagtattgtatcaaaaccatcttttataccagaagtcaaaatatttgacgtattaactaatttaacaaaccaagacactgaaattgacacaacgaatgcacctgaaaaactgatcaaatacgctaaaatagatgaactgcaacataaattcgaattaaccgaaactaccgctattaacaaagtaagagttttaagctggctggttgaatcaacaggtaccagggaattagttataccgctaaagcacgagtcattgacaataaccaaaaccggtggctgttgcttgtggtgtggaatatcggtaacttatcaaggagccacagttacagttaacgggcaatatcgaacagtcatcaaacgcgtatgtacagctgataataaaatcggagcaataatgttaatgaattggtttaaaaacaatgacaactgtgacatctttggaaacttaaccacaaccaagaatttctcaattaatatgtacaaggagagaattaaaacactgccctatttattcaacaatccagacatgcatttagataacttctgcgatatgttgaaagataaagacagccagctgatgcaaatgaagttcccaattttgggtaacaaatctaaattccgcaatcaacataactttgtgatccaacaattaaataggaaaaattggcttaaaagaaaccaatttaaattaatcatccactacaaatcaaaaactgaaaaattagtcaatttaagtggctcagatttaactatgttgtacaacaccacagtgttagacatggctgccaacacagaagtaacagacaaaacctatctatttggtcaaggtactggcatagatggtttgaacatgacgttggaagaacatcaaatacacaacacagttgtggctcgcagaattaatgcaatcaaatctaaactgctatcaaagaaagccaggtcaaccacagacatactatggttaacaataggagatgaaaacctgatcaataaacttaaattagaacaaccaaacttaagcattaataagttcaaatcaaataattgcaagccagcattgttgcaccttatagaaaattatggtacaatgctaattggtaaagataatcaatcaacatatatttacgcgggttatacaattaatgcacccagtcagcaaaatcagcactatgcagaatatttaagcttaacaagtgacttcttttcttcaaccatgtggtctgatactgagcaacaattaatatctgacattaaagtgtttaacgaagtcaatgccacaaccatacaaccaataactagttggactcagttgcaacacaactatcaaatgcaaaacaacgcaaatcgtccagtagtcaatttggggtgcaagttacctctgatacatccggaaaaaatagcagaaatgctatctaataattacagtgtttatggaatcataccaaacccaacagccaataatgggttgtttaaagtagaaaacagttgcctaatattcaaagatcacaatataaccatgaattgcttaaacaattattattaccatgccacgactggcaagccagtgagaacagacaatttggcctttaaattgaacatattagttcatgtattaggatttataatagttaaggtagaacccattccggttaactcaactgtggtagcttggataaacagtgaattacaagaacccgccagatttaaagctaaagtaccatggttaaatgtagatgttagaagtttgctagccggtgaacctttcttggacattaaagaattgttggtggacaaaaaattttacagaatgttgatgatgagattaacagccgaagacaaaactgtcaaagatgcaatggcctacgccaggtcattggctagtgttgaagttactaatgctacctacataggttccacatctcaattaaatctaagcagcgtaatagacacttgtcgtttggcaataatgcacaggacagcattgttgtctcaactaagtgtaataaccaagttgttgaacaaagccagcgacgtgtctataattagaataatgttaaaaaacatgctaaccacagcattgtctttaactgataagttacctggtttactcagtgctgagacaattaacagtattatttctaatgttataccacaattaaacaacaattacctatctgagctaataattgcaaatgacaatttgttaatcaagttgggtcatacaagcggtaaattggtaatgtatcatcctgagactgagccgcactaccctccggaatcagaagctgaaattgaatcttatggatacgaagaagatgataatgaatcaaatttgggagaagatgacacaacagaagatgaaatgcctgaagaagtcaactccacaaaagaagatgtcagtagtcacaatgaccaaactaataataaagcaaatgatgagttgcaaaacttaacaacaaccaatgatgattatgaatcaaataccaaattagaaaggttatggcttaagacaggcactacatggtcagacagttggttacaaaagaagtttttaaacacattaacagacaatgttaaatcaaataaactaatgccaactagtattacaaatataataacgggtgatgagcatcaatttataaggcaatgcgagcaaattgttatggattgggacaattcagaatctcgttacttaatagaccccagtagcaatcaatttagaactagattaacaggcaaacctcagcaagtattgttaataacattgggttctactggtgacgtattaccactaattacgctagccaattgtttacaccagaacggaataccttgcactataatgacacactatgaccatttcaatttaataccttcagaacatgggttctggcctatcactttctccatcaaacaacaattggatttagttatcaaattgttttgcccttattcaggaaaaaaaattaatagaaaagtaactgaggcttattaccagctaatattagctagtatgttcaaaaatacatttgagttagactgcagattagtaattgctggagctattacaccggcagctgaatgtttcgccgcaaaatacaaatgtgacatatattggatacgtccttacccctggctggatctaccaattgtcaaacttaaatgggtcagatcgatagctaatgccagcgcacaaatgctgataaccataatgggaaggaaaatactagagaagtacaacgtcactcctggggaagacaccagactagaaatgtccaagcaactagccacatttaacttggaattgctaccagagcacatgaaaaagaaatacactaatgcaataataactggaccattgacagccaaatccagctatgtaggaaaagctgatgacctaatggaattaaccataaacaactcagaagaagagtggggtctggtgagctatggttcagtaagctcagacaacagcgttaaaatagcttccaatttggcaaaagcaataaccaaacataatttaaatgtggtggttaatttaagtggttccaagcatttgctagagtttgaatcattcatgggtcttacgagcgatggggtcacaaaatacaataacaagttggtttggttaagcactgggttcagctattcaagattacttaaaaaattccagttcatagtcaatcattgtggagctggggtgttcaatgaagcaatagacaatgcagtgccaatatttgctggtccaatatttggggatcaacctgtttggatagaagctggttcaaaattgggcatagttcaccaaggccccaattacttccaattggaaacctatgcgactacagaacaattcatatcaacaggaattgctaaactgccgagtttaaaaaccaactcaattagagccaaggctttaaaatcgaacatagttcaaccgagtttaacatctgtacttggtaaaattataagcattgaaacaaacgttaaaattgataatgtaccatacttaaaactgtctcgtactttagagttgccagtaattaaatgctgtaggcaacttaacatggagactggtgaatacatttgtcaatttggcaaattaacttgcttgtataacccaactaacactaacacttgcgttattgactcaatgtttgcagcaataggagatgaaaatttgttaactaatgtagcagatggatacaacactcactttatacataaattagccttgcaatactgttttaacttgatcatagtcagcggcaagtcaatagacgaaataaccaacaacaaagggtcagtaggaagaggttacatcaagttctccaatcgtccaactttaatagtaggtagagtaatgtcctccgatgttggtcattgttgcttactagatgggtccgtagttgacataaccacaatggatgaatattcgacagcaggggcaattcctgacttagaactaccagtttccaaagaaatagcgttcagctttcaaagtttattatcagaaggttatcaaggttttaacaaagacttacaatataaattgttgttaaaccaattagaaaaggaatggttgactaggtatgagattttaacaggcatttgtgtgatgactaaacaccacaatagattaatagtgtcagaagacaaaagagtaatgagacctcaattgtgcctattgtgcggacccaccaacatgaggttcgggtggtgttgcgctgaattcataaatgatcaaaccatctacagttacggaagtttcactgaacgagtaaacactgaaattataataaacttaaacgtaccaatagaatcaaagaccaaacaaaaattggcaaaaattatacatagagaagaaaccaacaaactgtacagtttgtcaagatatgaccagtcccaattagctcaacaacatggaataactaccgatataatacacgaagaagctaaaggcaaagtaatagtttacaattatgaaaatagaagtcaccacctgcacaactctgaagaactgatgataactatggttaatcaaggtaaattgctggtgcaatggggcctagacaaatccaaccctccagattctccagtggaaaagacaaaaaatcaacccattgataggttgattatgaagaatgggaagtggtacaggtacaatgagttcacaaacaacgtattagctgccatagagtccaaactaaataatatgaaattgtatagaaccggagcactaggggaagtgaacatgcagaaaatagtgctacacaaactttacaaaaccgtagaatctaaatcaggagcaaaaatgttggattacaccatacttccggaaaaaaccttaactatagagcctgacggaaccttaacagctaaattgatattaagccgaaattacaacctgctagaggacgcatcttcaatagattggtcatctataacagccaaaatgttaatgctacaacaaggtacaaaatatgttgtgtttgaccaaaaagatgtgtctataataattactgaagatttgcacatttattatcatcaattcgttaaaggcggtgccaatgaaggttctagttcaatagacgtaataactactgccatgggggcacaaagcaaatcaaacaacaaatggtttgaaatatcaaatgacgacaaccttaacctaacggctttggaacaagactacaatatagatttcatgaacaatctgcaattaaccagcataccagcctgcaatgctgtaacacctcgcagtgccaatgaattaactaatcaaagcacttacataatcaattcagttaattggtgtgttaatttaactcaaggtgcaaccgaattgacagacgaattaaccactgatgtaattgatttatgggagttaacagacctatcagatcaaatcattaaatatgcgccgttaactgtaggatcgctcaaatcaaaagaaaaaccctacaaaatatccaagtgcaggaagcacaccatgactcagttcccaatccgttcaagaccagttttaaccaagctaatttatatggaacacaacactattacaggtcgactaatgtcaatagccaatattaggaaaataattccaaacgtgagacaaacaactagaagattagcaacaacttacttcaagccaacttgggagtcagcttgttctgagttccaaagtagcaaaataacttattcatccaacaaaactaaacaatggatagctaaacaccacaacgcctcaaaagttttaaaagatcttgagacgtttttggtagaaggtaaccaaataaggtccatagcagatataaatatacatttaaaattggaatcattgttaaaggacccagctatacaatcattcaaacaacaacagccaaggtcaattatgtggcaacattattacgttgcggcaatatacagcccgatatttatggaagttaaaaaaagattaaaatttttacttaaagagcatataatatatgcagatggttataaagccagtgatttaagtaaagtattatctactatcagggctggtaaatactattacgaaagcgatttaaaaaaacaagacagacagacagataaacccttattggatgtggaaatggagatttacagactattgggagtggatgacaaagtactaaattcatggagaacagtacacgaaaagtggcggttcaagggcacttacagcaaaggattatgccaagaaatgcgcactaccggacaagctactactgcaataggcaacgtcataactaacatgcaagcaaatttaccagtgattgaaaaatacggtgctactattaaattaatgatgatgttgggggacgacaacttaatgaatatggaggttttagtaaacactaaagaagcggagaaaaatatagctgtcacatgtaatatgcaaagcattggaatagtcagaacaaagggcggcaatttttgtagtatggtctgccacactaggtcagacggaacaataggattaggaccagactacgttaggctcaaaaacagatttgaagtgactaatggtgttcacgaaaccaccgaaaccaacttggaaatgaggagccaaagttatttgtcaatgataggtagcacacctgaagcaatacgcattattaaggaaaagaattggacaattaaaccagagcagtggtatgaacaaaacactctaatccaggcaactgcaaaaatatataacaccgatgagaactatgtaattgacaactataataaactgatgcaaatgattgacaatcaacaaatatttgaacatgaatttactcagtatgaagctagcagaaaaatgtaa

SEQ ID NO: 1202 - DNA, 14610 bp, Capsicum frutescens endornavirus 1
  source 1..14610: mol_type = other DNA
atgtcacacaggttggatgaagaactagaatttgttcaatttgggccagaagaatgtgtgcctgatttgaacaaagtagatataaggacaattagaaatatgatgttgctatttgatagaggacactgccatgtggatataccattggaggaagtgggcaagtttctgcaaaacagtcagttgcaaagcacagagttgttttatggtggaccaagtaaaaaatattatgcaaactgtaggccaatgctactaccgccctccaaagttgacggtgacaagacagaagcagcacaattgttgttgactgggctaattagaaagtttggtggcagtgtaatcaacatgttactgttggattgtaaaaacaactacaacatgagtccacacatatacaaaaccggctgttcatatggatttaaggccatggaactgccaaacgtggaagcggccatgacatgcgcatgttgtggaatcgtgaatttggtgtggttattggatgagactgatggattgcaattgtcaagatgtggggtgtgtctgcagccacttttggtgcagaaaatgttacctgactgcatagtatggggcatgcttgaagtggtcgatatcacacaacttagggttggtgcgctagagttgaacaacgctgaagtaactttacaattggacgggcaaccagcgtttgggcccgctacactagcaaaattaatagatcaagacttgaggaatatacgatcagtgatgtcaagggccatgagcaaaacaatttatgtgccaaatgggttgacagagcaccaaaagaaagagttggcagctgctgtacctgcctacaaattattgccgatgcggggcactccaaatccacatgccatgttagcagcagaaagacgaatctgtgctgcaaccatggcagacaaaaggaagaaaggaaaaacaattctggatataggctctagagtgaacctgaacgaggtagaagattggcacgggatgggcccatgtttggattggagggatgttgagcggtactataaccgaccactatctaacacaatgtgtgatcatactgtgaaggaatgtaactgccttgacaaccaagagccattaataattagcatagactcgttgtatgacatagacccaagtgacattctttctttgatgcaaaggacgaaatcaaaccagttattttattgtttaagcaccgcagaagtggattttaacaacaccaatggcaaattggcacaaggacaaggcgaatggatgagacatgacaacaaactaataaccgtgctgaggggagacgacagaccatatgtcaatgattggaaattgagcagattgtggtcaaccgcagatttagtgcaaataggccaacaagagatgagcatccaaaccgtaaagatattgggtaaccacatcgtgagggtgttaacattggtacctgacggtatggattgcctaaggactagacaagtaggtttacagacaatatcacaaattgacattactgtccccattatagatgttgagagttggttgaacgtattaggacccccaaaactagcccacaaacaaatgaaattagatctagcgctataccgagcattgtactcgagaaacttgactggtggattatcatatgaaaagttgattgagttcgggttgggatatgcacatgccaagtacaccaccaaaacgactaccatatctcaccagcacgttactgctgatgatgtaaggatgcatgccatgttggcatgtgcagcaaccagaagaaaattcgcttgggttagctcagctatgaaattgaattcaacctccaacgtatttggactagatcctatagaagtgaccaaactaatgactttggacctggcaggaacgctaataaaagacatatggggtgcaatcttaccggacgggtttatcaaacaacgattggatgaactagtaattcaagtaaccaagtggatcaatgattccttttgggacacgttggacacattgacgagtggaagcagagtgtttacaccaaccgtttatgtgtggccacaattaggtgacgaagttgcatgcaatgctgaaagaatctgttatcaccacaaacaatggtgcaatcatccattatcattagacaacctgtgcgactgttgcagattggtgacagcattgcctaatcaaacaaaatgtgagtgttgtatgtcagaatcaagtcgccatgaatgtcaccacaaatgtcagggtgggcatttggtaactccggacccagcagctttgacatgcacttgctgcaaattacaaacattaaacgacaaatgccaatgttgcagcacattgataacgaagcgtcctgacaaacaacaaccagtgggggcggaaatttacgggcccgaacaaaaagaaatgtcgaaaacaatacgcagttataaatacgaaggattgtcaaacatcactagcatgccaaaggctgtcaatcacgcagaacacgttggcccacatttgactgaaccgattgagccgcagtttgagcctgcacccacgcccacatccatcattaaattgtgggaagaacagcttgggcgaaaatttttgagtacgccagataccggcgcgccaagtcagttgcctgatagcgatgtgcaaggtaacaaagacgaagccgaggcgaaacaacactctgccccagacatcgtgggtcaactcccaacagaaaatgaattccaaaaaacaattttggaactaaccggaataactgacctgagttacgttagcaatttgcgatatgggtacacccaaagtgtgacaagccaacttgcaatgcccaatgagcaaaacccagacaacagagtgggtgtaagtgaactcaaatatttcccaatgggcttgaatcaacatgatgccagcttgttagcagttgtggccagacaaaaagttgctggcggtggattgtgtgcatattatgcattggaacattgcatgggcgtgaaactatcactaaaacacatgcagaacacactaggctgcaaaaaccaattctctgcgcatcaaatcataaaatacggcaacatgttgggccacaatgtggcagttttgaccaatgaatcggtaataactggcaaggttgacccgttcagtgacaaatttttgtgcatagtgcacaccctggaagatacatcgggggccccacattgggaaccatgcaatgtgattcaagtaaatgatcttgaagcaacaccatgctacatgggattatttaaacaatcacaagtcaataaacagttaggattgttaccaccaaatcttaacgaagagcaagaaatgcgagagcggtgcatgattgtgttgaaactaatcaaacgagcaattccaaaccttgcacaaatacagtcaggtagagtggaaagcacagtatacaacgtgaaaggaatagacagattcactaacaacaaactgaaacgacatgaccctggcaaggggttatttgattttgaaatcaataagaattgtgtcgaactaatgcaagcactaagttgcgagacaatctcgactaggttagcggatgaactggaagcacctctaaacattaacacaatgcaaaatgtggaaattgacgaactcaaaatttccctactaagaaatgcagtcttgcagctaagaatgacgtggttgcaggctatgggagcactaactagaacagatgaccactggctaaagatttctgtgttaacacacaaaacaagcaaaggcactagaatgttagcattgcaggacacaaagttaaaatccggtgacattatatcagttgacacaatagatggagcccaggaccgaataatatggaagttgaatgatgaatttcattgcctagattggttaccaccaaccatagggacacaatccaccatattgtacgtcaacaagcacagttttaagagtgggttaattagagccatgatattgaaccggcaacacgttgactttcacaaattcaaaaccctagtggcggagagtgcatgcacaattggtccagctggaagtggcaaaagcaccatgatcgcatccaattggcaaaagggcagcatagccgtttgcaaaacttcatcagccgttaggaatttacaaacaaaaattaatgggccttcaaacatgatcatgagtcacgaaaaatattcatacactcctgcgccagatcaccatttggtgttggatgaatgcagcatgtacacttggtatgatctgtacttttcacttacaaaactaccacaaacattaacaatgtatggtgacccccaccaaattagcaccatcgacacgtttcttttaggaggtgaaagagtcttagacaacatcacagattatgtactacacactcacaaactgagatcaacataccgttacggtgccacagtttgcgagttgttatcaccactgttaggtgagttgtctagcaaggccaagcataacacagtagtaatagacttaaatttaggggtctgggacgatgatgaactccaaaagataatggcagaacacaaaccagatgtggtgctaacccaccacaatattaccaagcataggttgggcaggttggcacctggtaccaaggtggaaacaattcacgcatttcaatcgctagagtcgaataacgtgatgatagtgcaatataatgaagggggcaattcaaaaatatacatggacaaacggtatgcaatctcggctatcacccgagcaaaattaaaagtagtgtgggttagtgttgggttaactagtggaatgaaactcatagacaaaatcagaggcacagatttggaaacactgggtggtggcaaaccaaaaaggtcagaagaggatgatcaggcacttcagcaagcaataaacaaaacaatgagttcaggtgtcagtggtgaatccagcggttcaatgtcacccatgcaaatggctcgtatgaggttttcgcaaaatttggcaacaacacacacccacaccaaaataaataaacaaccagccaagattgcagtagtaactaaagcagacattgatgcattagttgattcttacaccatgagcagacaaccgctgttaatatatgaagggtggaaagagtttgtaaatcggtggacaaacacaataccaacaaatacgaaaataatgcatgatcaccagagtaggacaattcgaatgcagctttatcagtgcaccgctactgtggtagttgatgaacagttcgaatactactcattgcaagtggaatgcccaagatggatgccactcataaaggaaaaaataatgtcagaatacaaaaaaggtttaatagaagaatggcacaagcatgctctgggaaaaccaattgacacagtagtatcgctactacgaccctgtcatcggcaatggtttttagactatttgccactaagccgaactttggatacggaacaaccgaacccaccggcagcctcaacaaacttaaatcgttctgaaagctcaacagaaatagaatcaaatgatgaagagtggtatgatgcaactagtgacgagttggttgatactgacgacttaaaccctgaaaacatgaacttacaagaattggaatatcacaatgtaatcactaatagagaactaagcacaaaatacccctctattgccgaattgaattatcaacaaataaaatctttaatgcaaccaaatagcccgatgttgcaaccgattaaatcatccacattagtagtgttagtgcagtctattttgcccaataccaaactaaccacagttgtcagaacaattgaacaaggatttgaagtggcaattgataatcatgcgaacacgataggggtaatacaggtggtgagcgatggacttgtgctgaaagtagttgcaggaagtatggaacacaaaatacagaccgcaattattgaattcaaggtcaaactttacaacaggttggtaccatacgcaggcatttggaaatgcagtgcaaatttgaacgaccaacaaataaaaattatcaaaaaatggtatccatggttaacccccactaatgaagacctccaacagtatgaagacgaaaatctgttagagttgataaaacacggaaaactggacgtaccaggcaaattgatggacctgatccaaacaatgagagagctaaagcaggtcataactgaatatgaatcaacatcagagaatgtattagaggtgatatgtgaagtatgcggcaatgaatgttgttcagagtttgaagagttgaaattggaccatgagtgcctggtaactagaatgccattaagtgcttcatcaaccagaacaattagactgtgcagcgaatgggcaatactcatgaacgacatggaccagtgctttaaattggaaatacatgggaacacaataacaattttatcatttggagggtgttcactttgcagtggactaaaattcctatgcaatgaccaagaaattttgcggatatctccacagagaaagttagaattcactaggaaagtgaggctcgggattaacagatacccagaggttttgatggcaattatggtttcattgcacatgccgacagaattaactactatagacgctgatgaaagcatggtttgtgtagacttattagagggagtagacacagcagtacgaatgccagcattcgaattaggcatggtgctagaccgcatgcgactggcaccagcttatctatgggctacatggaagggacaagaaaggggtcaatcttgctctatgtacataagtgaaaacatgaaattgagggaggaatggcaagaaattgcaccggcactacaaataaaggcaatgtccaatttgccaggccataggtcattagtcaatcgacctttgggagccaagtaccgcaacatcaagttgacagtgatgaagttgaacgagtctgtcctttgtgacaatcaattactggcctccaaatacaattggaggtacacaccattagcaatcatggtagaaaagtactactggcataaattaaacgaatggccgtggaggttggccaacttgatcacacttaacggcaaattggcgaacattgggctaggttacgatggtgatttgccgataaattcgctgaacctcccactaagttaccatgaaaccaacaacacagcagttaacagatttttggtggataaacggggggacgccgtgctaagtacaatgaaaaagacataccatatagtgtttgtaagtaaagcgcaaatgcaaaactatgggccgatgttggcaagagactgtgaaggcatgccaattgaagagcaggggtgcgaaaccatggatcaagggtttgatatgttaacggagcaaatttgtctcaagtatttctacaatggtttgccatggggagaaattagtcagatggtaacagattatccgtatttatccatattgacctctagttgggcaaatatgtgcacacccactgacaccaaatatgcgtttcgatactatcaaaacataactgattgcaataacatgttagaaaaaatagagcactcatacggtgggggaaaagtgctgaactctgcaacaaaggagacggaacctgacaataagcaaagcatattagactgcatgaaggtacaacaacaaagcaaaacaggcccgtggtacactgaagatgtggcttcaccacctaacttggcctgcaaaaatgtattgatggggttggtgcagtgtcggttgtcaccagatgaaatggcagaagttatgcgaatgaacaacaaaacatgtgtgcatttaatcatgccaaaaatgatagagcaaaacaatcaattgtttggagtggcaagcgaagacgcaacacattacaaattttggtaccataactccagccacttaacactggtaaataaaggtctgttggccatgtttcagactggacaatgtgtaccaacaaaccacggcactcttgtgacacatgctgctaacagggtattaggccattgcatagttaagatattgctactgcccaacaagtccaaattaccaaagtatgtgaggccaaatttacacgacaaccaacaaaaatcagtgacgttcaagttgcctgaaattaagaattttaagcaattcgtcacaactggtaaagcaatatcttacaaagaggtgaccatgtcgcttaagttgtatagagctttatcattgagaatgttgcgtccaaaaacaacgctggacgatttgcttgcttatgcaaggacatacagccatacagttgcttacacgataagttcaaggagctcacagcaaccacaatttgttacagagttaatggaatgctgcgtttgtgttttcgtagaaagtatcaagttaaatgaagcagcaaaccgtgtaatgaacctcataagtggcactgaacacccaataactcatttgcacaatttaaaacatacagcatggtacagtttggtgaaaatcttagcggattgttaccaatggctgggattagacacaaccatagataaaattctagaattaagcgcaactgttgggaaagctacaattggacaagtaatcaaaaatattgacaaactagtggtagtgcgcattagtaaagttgacacagtggacccaattatttgttaccaagattcaactggacaatacaatatggaatcaagttcctttatgaatacgaaaagaaaaattgacaacatgttgcaaaatttaagagaaagtgtacactggggcatgcaaattgaacgaaacaggcaagatctcaccgatggtcgtcaaagtggacaattggcaccaactgcaacttccaagctggccgacaaactagctgataatatagggggagacagagacgagtgtattgaacagttgttaccaattatgctagaagcatatgaaggagatgaaattacaacagcagtgatgcgagtagtgaaaaatgttgggaggcaactggaattgagacccaagcaaacaatacttacctgcattaacaatgacgagtatttgtctgcagcagaattatcagacaaaggcaaagggtgcatggaggactgttttactgtagaccacttaaaagctgaagtaaaagagttgaggtggatgtacccagacgattgcaaaacctgggaaggaaaaaccatactatttagcacaataggaagcaggggtgacatcgaaccatatattgcatgggctcaattgataagggaagttgggtcagaatgcaaatttttggtgcccatggattacgtgagctacgtgaacagttatgggtttgaagcaatggggttacaagtcaactccaaggaattgattgacacctgcataagcgctgaatgccacaaatggaacccattaaaattgtatcaggtttggaaaagaatgttcgaattaatagaagggttgttcaaattcaatcaaagcaaactaatggcgttcgtagccaatgccaacatggtaatagaaacacccttcacacacataggcgtgcaaatagcacaaaaactgaagataccttgcttgttcagtactgcctacccgtgggagcaacaggccggcatgacaaccagagcagatggaatgactatcacagagattattgccggggttgccgcatttgcaccgtttaaaaaacacatcgagacgtggaggagggaaatattgcaattacacaatgaacgcggaataatggttcacggggttggaaatcccatggtgtatttgcatccagcacaaacaaaatggtggaaaacagccaaaacttcgggatgtgtaggttatgcaagcacggtggtcgagtcaataaaacaaacggatatagatttatgtgcctgggctggctcatctatgagcctggcagtctgtttcggctccatgaccggtacagccagaatatctctgacagaccaaattattgacaagttcataagtgagtttaacatagtagtagtggactctgagtaccaaaccaaccgacctgatgatgaggttatagttgtcaatgaggccaattacaacatgctgttcagttgtgtcgatgtagtggtaacacatggtggcagtggcacagtgcacaacgcactacgaaaagaatgtgttgtgatagtggagccacactttggcgatcaattagcctggcttaaatcaatacaatctcacaattgtggaggtaggctgagtgaaattttggacatgccactacaggaggcgatgggtaggattgatcaatggagtgtgcacgccaaacagttaggtacaacactgcgcagtgaggatttcagggttaatttaatatccaatagtgcattgatctggcacaaagcatctgaacatactactaaattattggcaaacatacgagagccaattaatgaactgccaattaatccaaacaatgtggtgagcgtattacaaggccgcaaactgaagtggagtgattgggaaactgaagaaacattaaatatttccatgctaatgcaaaccagcaacaaacatcaaaacatcccacaaacgaaacaagcaccagacaaagacattcaaaaagccaaaggtccaacaaaaacgagcaggactagtaagaaccacaaggagaaaaaatatgaattcaattacaccattagcgaaagtgaagagctggcaatgaaaacatccaagcacgctcccaagcaagttacatcggtacccgcagactcaacaggtaatgaactggcgttatcaaatccagtaaaacaaatgttggaccagtttgtaggcgtcgaggttaccagattgtcagaaagtgtaacatttatacaaacaggtaaagcttggacgaaagaccagttaagcgcaggccatgacaccccaatcacaaggaccattaccagtgaaccaatcatagaattgcctgatgaaacaacacaagagctaatagcaccgagccggccaaaagaacccagcactcttgtagtgcaagaagtagagtcatgtgacgccaacaccaaagatggggaagtgcaaccagcgttacaacacacagagtcaacgccaatagtaatagaaatgcaggatgagcaagaacagcaatcagctgcaaatgtgtcactgacaaccactgagacaataacaattaaaactttgaattcgagtgttacaaccgattatcaagaaagtatacaaccaattccgtacgagtacgtcagtattgccacattgcgaccaacattgatacagaacatgttccacttgaaatcaacacaggagcggggaaccccagtagaggtgataagcacagtgaaggttgaaattgtgcatgagccgcaagggggttacagctgcgccagagaggtgttggaaaaattgctgaccatacagtatgaaattgatgagcaccaggcaagtagtgtgttaaaaaaatgttaccaatggttgcaaatcatcacactgccaagattggaagacattaaagcactaatcacagttctagatttgaaagcagcaattcagttggcaaataacgcaatacattatgaacacaatggacccgagggtaatacaggatatgttatacaaataaccgggggtactgctgttggacactgtaggttgttgtttgttgagttcggcgaaaccagggaactcacaatgcctaaatgtacacaaatgacaatcagccaaagtgtgcaagatgaactaaatgctataattgcacgattgggatgtgagcaaaagtggaatgaagtaaacataccctcactagtggtgggtgaggcatcagaaggagacatttggtcaaaattggacaccacatatacgcatgccgagttgatctacaaattggaaggaagcaagttagtacacacagcagacagaatggaccgtccaatgtcaagggtaacatgccgacaaagtagttcagtattaatttgtgatgaagtgttgaccccagaccgctggtattgggtgactgatggtacagggtggagaggagcaatatgcacaaagattcatggccaaattatgctattaactaacagcaattactataagtggaaagagcatgtggtagtgctgaggactgacatcaaaattggactaaaccccaaagttccacaaaaggtgcaactcaaaaagaagattgtaaccacaggagattcaaaggtcacggctctaaatcgtagcaccttgtatgagtcacaacagcattattatggggtggttataacaggcattaaggaagaaggcgcagatcttgtcgctgtgtatgattacgacaacagaccccatcataaatacgacgatagagattttttggcgtccatggggccaagcaaatctgtaggtcttgggtttgacttgacagggcaactctgggatgtcctgatgaatcgggacaaagccttgagacatatgctgcacaaaggacaacataaagttgcatttgagttttctaaccaacctcaagtgaaaacacttgtgaaagttttgcggaacagcaaaattaaacatatcattgaaggcaccagcgtttatgttgaactgtcaaatttggatgaatttaaagtgagcttattggaagagtgggcaatgtacattgaaatgaaaaacggttctgcaccgcatatcgatgacgtgctcaccaggtatgatcaatgggtgcctttggctgaattcatcaaacaacactgcgataatgacaactacaaacatgtgttcgggaacgtaaatattgacaattacaaggttaaactgtcagcaggacatagacacctcacaaccaaaatatctaacatagtcaaaagtgaaatggactatgaaccaccaaacctggtccacagaaatttgtgtttgactatgaatgtaatgatcgacaaacgtgcaggaggactggaagaaccggcattctggaaatttgaacatgattttcaacacaataatatttcaaggtggtgggataatttgatcatcacaaaacctaaaaccaaatttgatgcaggtcgatttactcaaatcaacacagaagccatgataggaaacaacccaggaacaattagatcggatgactggcctaccagcactggcgtggacggcgaatcgaccaaaatgccctatctatccgtcaaggagtggacaaacgtcgaggacaatgaagcggcaacagctgagattgctgactatgacataatgagcttatgggaagacactgacttttctgattggaatgaaaaattcggaccgaagaacgaagtcatagtgagatccacaaatccaaccaccaacctgagagttacaactaaatacactatggtgcaataccccatatacagtagaccggtgctaaccaaagcagccaaccaagagtttaatgcagtcacaggtaggttacacaacataaccacttaccgtcgccaacattataacgtaagagctgaattaaacaaatttatcaaaacttattttgacgaagggaaaattgacacattgcggttatttgcaaacgataaattgacttacaatgatgccaaggtactcgattggttgcgagaccggccagacagtaacaaagtagcagaagaagtagaaactatcctgcaagagggaatgcagttgcattcaataaacagattgaacgtacacctcaagctggagtcattgctcaaggctgaaccggcttcaagtttaaagcaggtaaaggccagggcactactgtggcagtgcaaaggttactgtgcaatatttagtcacatatttaaagaagcaaaggccagactaaagcaattgctaaaaccgaccattgtgtatgcggacggattgcgtgccgacgagttgtctgcccgtgtgcgactcacaactaacgtgcgttacttgatggaaaatgatttggcacagcaagacaaacagacagatcacgacattataaagtttgaaatggagttatatagattattgggagtgcatgatgacgtgataaatttgtggcacaatagccattttcattggaaatacaaatcaagaacagtaaagggggctggtgacgcaatgcgtttaacagggcaagccaccacagcactaggaaatgccatcactaatttgctagtgcacagaaaagtagttgacaaactgggcagcagcttgaggctgtttttggtgctgggcgacgatggactaatgtttacaagtgaaaaaatagatttgagcaaactaaacaatgaaaccaaaataaagcacaacatgatgtgcaaaccacacattagtgagacatttggagtgttctgctgcatgatggcgtgtataatgcaagatggcagttgctctttaggaccagacattgtgcggctacgcagacggttcgaatgtccgaacggcgttagtgaaatgacggcagagaatgcaaccgcaagagcaatgtcttattacatgatgttgggggcaacaccagaagtggtgagagatgttgtcagccaacaattgcccatcaaaccaactaaatggtatgatgtagactccataaggtccgcggtggcagacaagtacaatatgagtgatgaacaagttttgaatgaggaaaggcaattgctgcaaatgttgcgagaacgcaacagcttcaaacataacatattgcattggtatgaaggtgtttag

SEQ ID NO: 1203 - DNA, 16224 bp, Carteria obtusa associated endorna-like virus
  source 1..16224: mol_type = other DNA
atgcaaaacaaaataacagataataaaggacttaaacgcgcccaccaaagcggtgggcgcagcgagagccgcaaacgtggctctcgcaacgaaagggatagtggaaaaaattgtattctcactacgcacagtaatccattgattatcaaacgtgccaccatcccttacaaaatagctggggctcctctctgcataacaagagacagggccttagctctaaacagagaatacatacatgctgattgtgtgccaaccgtgtcctacgagatatcttatcacgatggacctaatgattacatacaaccagtatacactaatgagtcacatgatgattggggtgacaattgccatctacaagtcaacaacttaactgtctctgcgttgagatcgctacagagggacttcattaaagtcaagaaaatagggttccaaccctatgacggggtgggtaaggtttcagacaaggaatacgttactgaaggtatgataacttccacccccaatgagaacaggttgacaacatacaaaatgttagtgcgaatgctaaaatattggaacaatttgttgaccttgctcgtcaaagaaacattgaccaattttgtggcaaacggtcaagacagcaattgcggagaaaaatattgctattgcacagcatgcaaaaaagcgagctatgaccctatgccaggggttctgcctgacatctattgtccatggtgtgacaacgatttgaggaagcgttattgtcaacttcccaatgatgtgatcgcagaacaaataaatgatgagtatttgtacgtgctcggcaatgagctcgaaaatttggcggcagtgctccatttggacacaagcgatataatagccaacgccgagatgagggccaaaatagtggcacatgatttggaaaaactgaaatcacaacatggaaaatctccaataaggacaataagggtgagacccggaatgaatgatgaacaaaacaggaggttgagggaaatattcattaattatcacatgatttatggccaccaacccatcacctccacggcgtacaccgagaatgaggcagaatgcatgttgtacaaagccgttttggcaatgcaacactcagaagatgtcgggtgtataaatttcaatgtcggaagatacaacccaaagttggtggaaaatttcaaattgggcccagcagaacacaccatcatgatcaatcccacatgggatcaattaaacaatttgcaaccaatggtgaaacgattcgttttaatcactaggaaacccgtcccattaacagaagacactatgcagttgcccctaaatcaaggagaagtgttgtgcataaacaacaggatacatgtcacaaaaccgggcctgactgaggtggaagtttacgagaaagatttggcagaggcaatggaaaagtccacaatagacataggttcagagacttattttaacatcaaagtccacgtaggtgaaatttacaacttaaacgttttagtaaaaagtcaatttgtccaaatggacgtcccgtatgtcaccactgaagaccaaacgcaagaaatagaaatcccggtgttcaatgacaaggcctttttgggtttattcggagtgccacttatcacgtcatctaggtgcaaggtgcattccaaactgttaaaacttttggttacacgcaatttatcaggggaattgagtttcgacgctctactgcagatgggcactgccgttgccaacagcagatatagcaagagtaattacaccatctccaactacgacatcacagcaaaagacatagcccatcatgcttatatagcaaaaatattgaacttcagaacacagtataaattcatggcaatagaattgctagaaactgccccgaaatggcaggggctattaatgtccatagggaacaccataatcaagtttgtggcaacacaatacacaggaaccatagctgggaccatagacagattcttgagagattgggaaattcctgctatacaattacaagcctatttggaacatgaatgctgggacaaattgcatgaacaatacgttcacggaaaacttaaaaactttccagaaaccataaagccaatcagcaatttcaatgaatacgatgatgaatatcattacaccccgttacctgaggtgaccgtcatcgaattcgagactgattcacaagaaaataaaccgggtagaacagcacacaaacaagcggaaccgttcaaagcaacaagaaacccggaaagcgtaataaccacacaaatgcaaactttaaacgccgatgaagcagaaatagagagttacaaatcaaaactggaaaaagacaggatcgataggctcatgaagatgcaagaggctgacaatgacgcactatctgtggaagaacaagcagccgcggcataccggaattacactgaagcccaattagccagcaacccaatcgacaatgattacattacaacagcaacagaaccaccagagggggaagagacagtggacgatgtgattgatgagaattgggttttagcaaacacccaggaagattttgcaaactatttcttaaccaggaaaccatcagagaaaccagtgctacaagatcaaatttatatacctaatgcatcaagggggatcgtcatgaggctacttgactctaagtgccaaggattagatctcaagccggaagaacattttgtgaacgtcttcaacttccgtgaggctaaatatgctcatgacttgactgaaggggaaaacaacacctgtggactgcaagtggtaaatgacgttttcaaccgaagattaacaccaacagacatcagaaattacggtggcaccgtgcctgtgagtcaggccaccatgatgactgtagccgagaaacttggtgaaaacctgctaattctggaccctgagaaaatcactttgtgccattacaacatggactctgactattactatgtcactaaattgctaatcgacacaacacttatggcaaggtggaaagaatcaaaggataaagagaaaggcacacctccgatgggccattgggtaatagcaactggaaagctcaaattagctttctatgtgccaaccttggtcccaatgttggatgaaggcgaattgatggatgagttcaaaaataaacacaactctatcgaccaatcggacactgattcgataataaccagagaccacttggcaaccatggtagagattcaaaaagaacagagccacttaggacaaacactggatgctgcaagagggttcaatgtgataccaatccaaaatgtgaccacacttgtaaccccaagtttgttcaggtccaacaaaggtaggccagaaaaattggacttaaatcaccatgtgccaagtggtgccataaaatacgccaaattattaaacgcgaacagttctttggaggaaattaaagaactgctgctccaaagctataacgtgccagacaccttgcctgctgacccaagagacgcaatgaccaataggtatgtggaatgcatcaaaattgtggtcagacaatggtaccactggagcttaccggccaattatagatcaacaataagcacacattccacaaaactaatgcgacatggcaattattacaatttgactgtgccagattccattaaaagcggggacataatctatttgaaatcgagcataggcaaacaccgaatggtggtgaacacagccaaaccaggattggtgagaatacggatgagggccgcagagcaatccattacggtgcaaatgagcacctttagagaaagtgcctcctctgcactcagggaaatgaaagccatagggagtcacaaacactgttggctacactatctacaccttttgcagaccgcaaaaaccacattgggtgtgcccggttgtggaaaaaccaccaccatcgtggaaacatccgatgctgacacaaccatagtcaccaaaaccagggaaaaccgatttaacctcgtgtcattaggcacacatggcaccgtaaagtccatggaacaggctgccatagacaaagtgagaaccaaatccctgactgtagatgaatgcaccatgtgtgactggatgcaactgtattacatgataacggaagatgtcaaatcaatgaccctttttggtgatacctgccaaatcggatcgatagacatgaacccgagcccaggggtacgatacgttaaaccagtgcatgaattcacaccacaaacagagtatttgaccaaatcgtacaggattgggtacccattggctgaaactttgaaaaacgttatcaaggggttccaagggacacaagaccacaaaacgactgtggaagtgatcgacatggaagtaatggatttgcaagagataaggcaattggtcgaattgaaacacccagatttggtgctgtgccattaccaagaaacaaaacgaatactaaaacagatcctaatgaacatccaagtggaaacaatccactctttccaagggggtcagcgcaacaacgtgctggtcatccaaatcggagttagacccgtgggaattcatttggacagtaagtataacatcagtgcagccacgagggctgtgaacaatttgacatgggtctccataaataccatgcccgggcacacactgaccgccaaaatactaggcggcatatttgggggcacaattaaatcaggattgctaaagaaatttttgatcgataatgcgttcaataatttcatgaacagcaacttgggggagggagaaaaattcaggctggaagaggtcacaatggaccaaaacacaaaaacttatgcaatagaagtggaaaaagaactcatcaggatcacatacgatgcgaacaccatggaattcgtagatgcacacataccagaaccactcaccaacaaaactgatttacagagagtgaagcaagctcatgaacaaaatgtgacgagattcaataggctagccaaagatggcatttccacattcagcggggaaaaaactatcgaagttggcaagggcaccgaggaaaaattgtacaaaattttgtttgaaccattcgatcaaggcaagtacggaattgtcaccaacttcgtggtggacacaactattgacgcagtcaccggaactttaactaggtacgacgcgcaatttcagatcaagacgtacgtgtggagcttaagtatatcacctggaagtgaagcctgggtattaacagcattaattgacgaaagtggtttaacagcagtgtacaaaaaccagttcgatgaaatacacgatgcgctgaccaataatttcaaaaccatccttggagatgacggaaatgcagttattacccgggatcctgtgagagtgagatccagcccatcaattctcaaaactttgaaggtcaatttcgggttcccatgggtaaaacggtacacactccaagaggcaaagcaaacaatcacaaagacagaacctgcaccaaacgaagatcatgaggaagagttttacaatgcctcggagcaatttggttcaccagagagtgtgactgttgaccctgaagccaaaagggggacggaccccaataacccgtttggactcacaaatccggaaaaattaaatcaaatgatattgaaagccagatctaacataattaccgccatcaaggctgagaaaaatgtagcaacgactgttacggaagatgactatggaaacttctacgtaacaggtagcagaatgggggttcaagtgtccgtcatcaccaacaaatgcggagaattaaaggatgttgaacttaacaaggcagcaaaaatgttgaccacaaaagataaagtcataacacaatttaacgttaaaaagatacaatatgaggaaatggcaacattgctacacaaaacatacaaccaaattgagattgagttggaaaatttacaggaaaaaggagggacacatggtaaaatctcgatcgtaaaaattcatgacataaattcaatagattccaacaagtctagaaaatacttaatcgcaaagaacaaccaaaattgcgtgctcttccaaattgacaagttgattcacatgcaagttgtaactggcatgcaacaaattgactcattggattgtgatgaatcaacaaaagcccagatcaaatccgccatagcgcaaaccactgtaaggaaaaccaatgttgtcaaaaaggaattgtgggaaataaaaccaaacattaagaacttgggggcgaggtggaaagggttaatatatgaaatgttgaaatgcataaccgagcaacaagaaattttggaccaaatgatagaagcaacccttcaaagtatggccttccaaactggttcacctgactggaaaacttttgagggatggattcgaaaccaagtctctttagaagcaacagggttgatcacaaggcaactcataatacacacaaccatgtctaaacctagcacaactgaagtggcaataatgcaagagctcaaaagcatagcacaaaactacaaacaaagtgtggacaaaatcaacgtgcgagcagaagaactaacagagaaattattttctcttagctttgaagagacaaatctccacatcaaaatgactgatgaggaagcgaggcgaaaggtcttaaacgatatattaaaaacaaacgtaaaaactttaaatatccaaaataggtacgactgtatattgataccatccatcgacggtcaattgtacatcaattttgggaacgtgggcacggccttcgtaaaacatgtcgacaagatccaaactattgtcggtaatgtcccactagttgaagacatcgggaaaatgatccatgacacggaaggcagatacaatttggaactggggggggcaatgaaaaagcaggccaaatccaggtttgaccgggacaagttgcccttgaaaccagccaaagaacgcatcacaccggaagagaatgctgacatgatgactgacagtctgacgcaaaactacatagtccgctccaagcccaacaacaagaacccgttcgcaagacagatgaccacaagagaaataaagctgtcagcctggcggaaaatgcagaaactccaggacctattatctacaaaccaagtgcagggccacatgaaggaaaaactggaaaaaatcgacaatttcgcacgtagacactataaaaaaggatttgagaatgggtacacgaagttgagatacatcctcagtaaacggagatatgaaatatacacttggaaaacggcagaatacgaagtaatatgcatagataaatcccacaacagtgcatccatcaacttcttacaaaatggggaagtaatcattcatgacccggaggacattctacaagtggacaacgtgattgagcaaattaggctcatagattgggacagttcagagccataccaatacgacttgaggaccttggacatatcattgccgggaaatctgtggttaataggggaattcgtggtgagaatgaatgcatacagcactgaggcaattttcctatacaaaggcacaaatgtgagaatggtaaacctgcacggttgcggaccttgcattgcaatagcttttttgagcacctatgggagtgtttatataacttccggatatgatcgatattttatgagacacattgaaacattatgtgatccgggatttgaaagaagtctaatgaacctgataatgaaaggaaaagatccagatatagaattcccaataccgttgaacaacttcccaagaatgcttgaagccggaatagacagggtagtaaacactacaaattactttgtcgaaatactcaaggactcgttgggtttgcctcacaaaccgtgggaagggttaaacatgcaccacgagcaaaacataaaggaaatggaaatcaaagtgcaacacctagaatccaaagggttgaagccacaacatagcaaatggtcacccatcaacttctgcaacatcaagtcggcaccgctgtacacggtagactacaaatatgcatgcattctgaatgcgaaactgcagccgatgttgttcaaattggatcacatgaatgattggatgaggcttcaatatgaagtaaacgaaatcatatacacaaggtggtactctaacttcctgaaatttgccttcgggtgggtgggagccagagacggcgtaatacctgcagaatgcataatgtctattgatcagcacaaaaggcacaacacagtggtttatcaaaaagctatggaattggcaaaccaagtggcaagtcagtctttcaggatgcctataagcatcactataagtggacaactagatcaggaaaattttctattgttaacagaaatgctgccaaccataaccgtcgtgaggcatgaaaaactgtgccgagaaaccatggaggagatactgctgtatatagcaataatgaacaaaaacacatttgacagtagaaacatcaagctggatgtggtaacaacaaacccagcattctcaataatgaactctttcatgcaaatacgctcactaccccccaaaaattttgaagggttagcccattatgacgttatgacacatgaagccagatctgcaatagccgagtacagacacgttctcgagggatctagggagagctggaaggtctcaaaaagggaaaccatggaagcattagtctatgaacttgacaaacaattaactggccagcagatttggtatggaataaatctgaaacaagataaaacccgtgatctgatacattcttatcggtgcacaaccgacttggatgtggatggttgggataaaacagagaaaaccatgtacatattgccaataattgacaacaatcttttcagaatcatagcccaagatgagaaaaacttgataatttcggaagcatggtcatcaagaccaatcaaggtgtcgaaatggttaatcaatctgatcaacaacccgattgacattaaaaaccagatttatgtgaaaaccatacaacacctaggggcaggaatgttgtacgaaatgaacccattaattgagagcattgttgtgtcaccaacattgacaaacgaccaggtgatgcaaacctgcttagtaccagtgattaaccccaacaccctaagttggccagtgacgggatttttcgaactgaaagaggtacgtatggacacccggttggctggagcttgtgccaggaggatgtgcttggaagatccaacaatacacgacctcattgcttacgcaagaacagagttaaattcgacttattacggacacgtgggaatttggtcaaaacataaggagacggtggatacagctgtaaacactgcaatagccgtgtacctaaaattcaaacccataatttgcaacttgaggaaaaccgcagatttcctcacggaaggaagcaagaccctcttgggtttggttaaccacaacatgaaggaggtgttgttgagccttgcaacagtggcaatcaaacacgtaggtttagacatagggacatcagagatctttgacgaaattgccaaattattcacaaatggtaacgaaattcaggggaagatatcagaattcttcgaattagcgagggacatgactatggaaatagccccaaggaaaagaaagctaatgatatacgaaccaacggaagcgaatgttatcatgcatgacaattatgaaaaatgtcacaggagactgcaaagcaccatagcaaaagtcaaatcactaagtaatgaatgcatcaacaacagactgatgacagggataatgcgattcaaagacaccatggatcctcattatgatgaagaggcggcaggacccgcaactaattcgggctccattttcgtggagaatgccaacaagcagagactcgcacaatgggttgaatggggaaaatcattggtcgaagacgcgggacacgttccaagacgtagacaaggtaaaatgacaacggcaacccttgatcaaccgggttcctccaagcccgaagcgaccaaaggaacaaaagaacccggaaaaccaatgaccgcgaaaatgcaagccaaaaccattattaggaatcaggaagatagagggagacaaaacgcactagaaacagagccaaaccccagacttaaacccgcaaaattaacagtgtctgaattgtgggagagaatacctgaaattgaagaattcaacacggttcaaacgctgccccagaccaaaacaccaaaaatagaaccagaaccagaaccaagtacaaaccttacaccccccgaaaccgaaggagggatcaatcaaaaattgaaaccaaaaactgtgagatttgaacccgaagtaaaaaccatcaccgaagaagaggctgccaaatggcttaaagaggccggcaaagatatggcaggaaacctcaccgtggaaatggataaagagagccaggtgaaaaagcataagacaactcggagcgtagaaaaggaattcttacctacagagacagtggaatcactgaaacacaccatgaaagtcgaagctgaaagaagcagaactaatcaacaagatgaacaagcgggaagagcatggctaatcccacatgaagaggctttaaaaaatcaaccaaaagaagtggccacggtaggccaattaatattcgagcaactcgagcgggaaagagaatcagccgtcaaagtggaaaatgagaagcgagaccagcctgaagccacagaaccggtagcgaatgcacgagcgatcatgttaacacccactaattgtatcttggtagcatcgcatttagaattgatgaccaaaaactggctagtggcaattcatgaaaaatttgggttgcaaataatcaagcaatacataagttcaaatgatgaactcgaaaatggcaagcccaaccccagacatctggagaatctcatgtcagcaatggaaaaacaattcacaagttggtacgtcaacaaaaagaaacaccacgaaatggattcaagcgaggaggacatgaaggccctcaagtatgttgtttgttctgaattggacgtcaaagtgattgaaactgcaaagaggttgggtttagaggtaataaccatcaggaaccatgacatagccagtggtgaaaactacaacaacaactgggagaactgggtgaacttcaatcgagagcgggacgtggaccaaataagttttaaaagaatgattgtgcacccaatggaccctgccttatccatgggattggctggtgaggaagtgtcaaagccgcagagaccaacagtgtttggtcatgataccatgcacactctggaacctcacggacacttgtcaaccatcccaggactcatgatgggtccgttaatagatcaagaagtgtcaatctcaaaacaaagtaattatcgcttctacgccacatacaaggactatggattcaaagaaacagatgtggggatgggggattgcaaatatgcgttggcatctttagaccaacccggtgccatcagatcccaacttgaaagccagactctagtgaccaacaagggccaaagtgttgaggtgtacagaaatggaagtccaaacaaagaaggtgaaaattcagataacgtggacaacacatttaccgtcagcagaatgaactggcgcctggcggaattcgagccagaggaaataactctggcgggaaaaataaccaccaccaatagtctgcaagagatgtggcaacaactggtgcatgaccttccacctggagaattaaaagaaaatcaagaaatagtcacatctgaaaaaccatccagactttcagtaacttccgtaataacactagggactgagggtgatttcagaatcgccaatcaattggtgcgcgaacttttaacaataggcttggacgtaacgttaatattacccagcacaatgataccgttgatacctggagactacaagttcatctgctactacgcagatataaatggattaactgatttcaaaaacaagaggaggcaacacacagctctgaacgaaatgataagcggcatggaagagagagttctgaaccaaataaaacaaagtgatctaattttcacattagaacaagctgtgtttggaaaatacctggcagcagcgtatgaaaaacctttcattgtgtttggaaacgtggggccttttaaatctgacccaattatatatcaaaaggaccctgatgtgaaaactgggtttgtgaccgccatggaggagagattcatgaaagcggtgataaaggcgagggtaaattctaggtgtggttccaaactagcttacttgagcgaacatgcacccataggcaaaatactctacaaatttccttgggttcaagtacaacaagggaaatccgtgttactggaaatggcagacaacgtctcaaaagatgagcaacgaatagaatttgtgtgccaagagtacaagaatttgataacaaagttacaatccatgacggacagaaaggtggcgctgatagtgttatcaactggtgtgggcaattctgatcccgaggaaaagaaagctgtcatcaaaaccttaatcaaagagaaatttgtaattgtgatcgtggacaaaaacgtaatctccagtgacagcggagactgtgtccaggcttacaacgcagaaatactgccatttgtgactgtgtgcatcaaccacggtggaccaggcacagtgatgacgtttgtgaaagcaaaaataccccaatacatcatgccaaaagaaatagaccaacacttctgggctgagatcattcagaaagaaggtttcggagcaagcagcaaaaagacggcagtggaagaattccttaagaaaatgcccaaatacaaggacaatctacgaagcctccaaatactcgataatgcagagatagcaactagcaacgtgaccaaattggaacacgaagtgctgtgtttgcacgaagattacactacagaggttgtaccttactataacggtgtgcaaaacacaatcatcacagaaaaatatgcccaaatggaacccagtaatgcgtcgtgcaccttgaaagtaacagggttgaccacgatatacgacccacccacacacggattgtgtgttcaggaatgcattctggaagcaatacaatgcaagactgaagaagccacggcaattttaagaaatttggtcaccagcgaaaacaacatgatgtatgaaataaccaagtggccctacctgttgggaataaacatggttataatcgtggatgggaaagccaattatttcaaagccaatactaactcttcacaatgcatcaccttgaacatcagcaaagttgcaacacattaccattgcactttgtgcagaagaggccaaactacatgtgaaaacgtaagaacttacgggaaaagcaaagatctgtatagtgacaaggccataatcaacaataggttggaaatacaaaacaccctaacgcgatccgcggaaagcttgtcaactaaacaagaaattaacattgccatgatgaagaccctaataaaaacaggcaaaattaaaaaaccgtgtctggataaggaaatgctggaaactaacatgcaaacagcactcgcaaaagtcaatatacaccataccatacaaagacaaccaaacaggatgttaaaggttaaaataatgacatttgaaacgtattatgaagtgaaggaaagactgatcacaggcaagttgtattgtctttttggtgtaaatggcaacaaccagttgtgtgtggccatgctagatttagaaggcaagcaaatcctgatgcctggagaagactcaatagaaccatcaggttggatcatggccgtaggttacaacttaaaaactgccactaggaaaaagattgttaggtcggccacttaccaagctataaacgcaatgacatccaaatactgcgctgaccaaagtctatgtcaatgctccccagaaacaaacgcggaacaactggtcatcgctacatttgacaatagatggcaccacaaatatgatgagagggccacagtcaagaagtttgactatgaaaatgtgtatttcgtgccaagacaaatcggccacaccatgctagaagccattaaaagatccttccccagaatatcttatgaatacggaatgaccaggctgcacatcgacatgactccagaatacttaagcaaatggttcatcaaaggtgaacttcaattgggcgagttaacaatgacgcgcacaaaattcggttatatgtctgaaggtgtaacagatagcgagggggatcagaaaatcctgagagccgcaacagaaatgcaacaatacttcatactaaatgggaacgaatatgaatacaaattcgacagcacaccacccaaccaaatatcgataataggcaccaatggcgagaagattgacctagaggttaccacaatggaaatatcctggaagatcaatctaggaaagttggagaaggaaataacaatgatcaacaagcaatatgtgtcaaaaactggcccaagagtgttcgtcacaaaaatggtgggaggggccgacatgtggttcaatgctgaaggtgaacctgacaggactgccttccatataggccaattcagaaaagccctgatagaccaaatagggttccgagatgacttgatctccaggccacaagttgacagagtgctgggaacaaaattaaacaactcatatgccatcctgtccagtcaagccagttcatcggaccaatgggactcatcaggtaaaaccacagaaccgggaccggtggagaaattccatggtagaatagaaccaagtataaatgacatcactcatgcagagacagggggaaacgatgatttagcctgggaaaacatgatcttctgggttgacagagagtacatcaatgcggtgaaattcgccccaactcaaccaacaatgattaaagccaaagaaacggccatgaggttaatgaccacatggaaaacaacgacaaccgaattccctcagaggacacgaccagtgttcaacaaaatggtaaatgccgaattcaacgccattaccggtagactgggatcatcagtcaaaatgagaactgtacaaatggaaccaaagcatgaaatcacaaaattagcagacacttacttccagccaggttgggaaaccaagaccaccgaaatgagaaagcacatgctaaacatagacccaaaagccatgagagaatggttggtgggcagacctggccaattaactgtggcaaatgacataatcaaaatattggacgagggaatgtcaatccacccgattaacgaggttaaaatacactcaaaactagaatcattgttaaaaagtactgccatattcaccctaggttaccagcaggccagagccatagtctggcaaagaaaaggcatagccatgcttttcagccacatgttcaagcaactcaaggacaggcttaaatctctcctgaaaccggaggtcgtatacgcagatggtttaacaccatccgaactcggtagaagagtaagattggtgcgcgggtgccaaagcgtgatagaggatgacctggctcaacaagacaggcagacggaccatcaactattagattgcgagatggaattatacaaactaatgggtgccaacccattaaccatagacttgtggaggacctgccacaaccattggaggtacagagcgacttattactcagggtcattcgacgccatgagattaacagggcaagcaacaacagcactgggcaatgtcataacaaacatgatatgccatagagagttaatagaaaataatatcacatcaatgctattagtgttgatgctaggggatgataacctaatgatgaccaaagagcatgtcaacacagaaggttttgaagaaagaatgaaaataaggtgcaatatgcagtgctccatccaacaaagcaaagaagtcggtgtgtttctccaaatgttagtgtatgccacaacaagtggatgggatgtgtgccccaactatgtccgactcaaaaatagatatgaagtgaccagtggggtaagcgaagccacaatggatgtaatgaactctcggaggatggcatactgttgtatgctggggggcaacgaccgagtggacgccatatggaagaactgtgggggatcaggcaaagttccgaagtggtacaatcagcaacaagccatgattgctacagctcaacgcaataaatgcaccatagaagaatcattaaggaattacaacagactgttgacaatgatggagtcgaaaatgcagtttgaatacgaattcaagcattggacatggtcaaaattcagatag

SEQ ID NO: 1204 - DNA, 17517 bp, Ceratobasidium endornavirus 1
  source 1..17517: mol_type = other DNA
atgtctgttagtggtgacgacaaaatcatcacaacaacagttaaatctacaatcaaagattctgacggcaaacgtgagtacacaactaatgtgtccaaaacagtaaaagttgatggatacgcacgatatgagggtgtgcgcacgcagaaagatcatgtccttagcaacaaagaacgcaaacaatacaaacacatggtcctccacctgcaatcccaagctattaagactgcatcaaagaataaacgttatgctgatgttggcgttggtaaaaacaaagaaacacacgtttatcatttgaatgtctccgctagagtagccatgcgagctcttgcgcttgtcatgcacacagataaggcgatcggcactgacaacctcatcaggtcactcaatgatgcatttgaagacgccaatgccggagaccaatctgccttggctgagcttgctttcaagtaccaaaattggacaaatcagtctttggcaactcgtgagagtatcgcttcgcactacaataaggtcaatattaaggcgccgaaatcttccgggcgctttaatatgcaaaatgctaggcgacccaagaaaaacaaacggtcatccaatgtgcatgtagcagccgtaaccaatacaatcattggcaatcgctatacgcaccacaatgcatccatgattggtgttgtcagcgaactcactaaatgtggtttcattgacttcgcaacacgagcataccagtacaacgtgttatctgtcgccacttaccaaatgtccagcatgattcatgagcaagtggctgcaccttgcacacaaacggatcatgctcatttggaacgcaaaccaaagattaagaaggctacacccacaaacattaaacgcacccacaaagaggtacaccccattaaatcggatcaagcttacattgatcatgtgaaaaagcaacgggcaacgcaagcttgcagagcttcacgcattcttgctgcttcaggcaactttaagaatgcaacaactcaaacaatcactttgctcaaagaagcaagagctgtgtaccacaacagcaatctcatgcacaagattagggtggcacgacgctcacccaagaagggcacctctaacaacactcgcactttgccgtatgaaacattgcctcgtagcaggaagtcacagtactgcttgttacgaatgaccggctacacaaaaactcgcaacccccatgatgcacaagttgcatctggaaaggttcatgtgcgcattggtagcaggaagaatgatccgatcaatcacatttcttatgaaccgttcctcggctcactggaggctgactacgattgggttaccaactcgatcatttgcgaagggaaaatatggtacaactataaattctactccagtgatgtgacaatcactaagttcacatcattgcaatcaaacatcatggtacaagacaatgtgccgcttacaatgatacctgctgcgattgcacccactgaactagagatcgagcaagggattgatcctacatctgacgccgcactcaatcaccccttgaacggatttgccaatgagcatattggttaccaagccctgcctattgcttacacagcgccgccacccaaactaaacggaacacagattgaggcttacaacacttaccagcacgaacataatgctaagaccattgggagtgcacatgatagacaggcaattgacttcgctgcatcattgtgtaatgacacccctagtttattgtcatcattcaattccactgtgcagaatatcaagctcatgtcatcattccaaggcaaccaagtcactgttactagtgagccacacgccaccaacatatcaattgttaacaccgaaaatttcaaccgattcactggacggtcagcaaccaagaaaagcaacaaaattgctccttcggtgtatgcctgcatgatcaactcactgatacatggcaatcacatacttgatgttgtcaatggtgacgtcgtcgaggttaataaacgcacgccaaacaccatcaggaacattgtcaagcacatcacttcaatgggcgcacccacattcctcgaatatgcctcccaatatgaggatgcaaacacctgccctaatgaagcgaataacatgaaatgccttggtgacaggtgccaccatgggaagggtcgatggccacacattaaatatgatgacaacaatgggttcaagttccaatgcctcccagggatgacttacaattatagagcattacctaggtataacgcacaaattgctaacagggacatacaccctggtggtgatgatgtgctcgacctggtcttagaccctagctcatggtggacttgtgccaattgtaatggaaccgtgctatactggggcacaacctacgatgatcacacattctaccaggcaaccaggaatgaagtactggctaacacattctgtccacattgtcacaatcgtgttttcgttaaaaatagtgaagtcaaccccaaccttgacggcaatgtgcatgctcctttcagaggtctcgtcaacccattgcattggattgaggaaatctatcctggatacactttatccgcatcgtcaacagcagcaccaatgattgatgatcatgatgctaggttgttaagacgcttgctatcagttggtaaaccaaaagtcatttacctaccaactgaagtgtccgaaatcaatgacattcaatcatcgtttaggactgtttctttggttcctagacctggtgccctgcatgcattcggaggtcgtgcaactgcagaattgtatgcgatggtcggcacagcaatggccaacttagagagcacgccacacatagttactgtcaatgtgcccattagcccttcatttgagcaaatgacacactcacacaattgccctgcaattgtgtgcctcaccaacttacatgccaaagatggacttgtcaccgctgccattaataaggcacctgtcatctatgtgataacgcccagttatgaaggtgaattaccaaaacgccaacttggtgagttctacttgtatgcggctgccaactctgatcaaccatacgtaatcgcgaaaggtgacagccatggtatcgaaaccaggaatgttatatccatcagtggccattattatattaactcaacgatcaagaaaggtcactacttcctgatgaatgcatttgttaggtatgatggcaacatcaaatcacttcgtgttgtcgacactgatgacaatgctgttgagtcattcaacatccctgtactggaaaaacacagtatcgggaatttgttgggttatgggtgggtaactaaagaagttaaaatacaccgtcgcttgctttctgtgcttgttcgcagggatcttcgaggtggtgacctgtcatatgacagcatgatggaggccgctattggtctcgccatgaacagatacaatctagcagacaggaccgtcaaacttattaatgtggatgctgaaacgctcgctgatcatgtgatgatcgcaacacttatgatgcgtaggttcattgacaagcatgagcagctcgtcgggcttattcgcaatgacccatcatggcgcaacatatctgaacaggttgtacatgctggggctaacgcattgataggcacattcttgcaacgtggcaatgcactggagcaatacgccaaccagctaacccgtttccacgattccgccataatatccaaagttgatgcagtgttaactgacattaggaattggactgatgtgatcgtcatgcatgacaccaagcatcatgacatgacattcacaccagattttgaaatcccaacgtgcaaccaccttatcggtcccgtgccacaaaatgcaactgattggtgcaagtgctgcctcaacaacagccacacaccaacttgctcttattgcatgcccggacaaattaacatcacggcagatttggatgatgcagagtatgcctatttgaatgaagaagccaaagctgaaatgaggaagccatacattaaggacatgcagaaaccaaaacccggccgaacgccattggacgaaccacctaagccaaacaaggaaaccgcatccaaggctatccctggcactgagcgagagaaaactttcggtattcgcggcttaagtgcatcatatcatgggcacatatgctattcatgcaaacagccctatgcacacaaagcacgcaaatctgtcggtaaaaccgaggtgttcaaaattggtgaagaacacttccaatacatgggcgactgcccctggcacgaagatggacaatattccatcaaacttatagagagcacccccgggatttacatgcccatcactgacatgctcgatcaaggcaaggacaacaaggatgatcaaatggaacttgtacagctgacatcattcgagtgggctgacacacttgctaaagggactggcaccatgtggccaaccgttttgcaagctactccattactcaagggcaccatcaagatgggcgatgttttcaagatgtcggccgagatcacttacccattcgatatcaacacatgtgggcgtgatgctatacgaaccttgtggccacacttgaccattgataaaatcgccatatgtgttggtaaacatgacagctacactcagacggacattgagagcatagctaaagagttggcacttgatattgtcgtcaacgtcgagaacgaatacacattcatgcactatggaagtggcaagaaaatcggcctgctcagattatcatccagcaccggcataccacattggcacgcgcacacctgcgaattggttaaaaccccagattgccatatgagcatgctgcccgactgcacaccagcaatgcttgaagcagcacacgcaacactccataaagaaaaatggagtatgaatgcgccgaacacaaaacgtgttataaccgaaatccgtctactcaaatcatcattagctggtaaaagcactgtcactagaccagtatactcagagcatgaggggggcgccttcattactaacaacacatctggtatgcacaacttacaagcagggcttgtgcaccttgctgtacctagggacttgagacacataatgccgtatatcaattcaacgtcacgtgaaacaatgaatgttgacgcccttgcagctagtgctgacatcgtcgaccaaattgaaggtatatatgatgaacgtatcaagcgtgtcagggaacaagtcaaaaatattgttgacgtgttcacaaccatgcagtcaagtctcgtcccttctgatatggtgacgacagtcaaaaactttacaattgtttcccctgacaaaatccgacttacattacctgaaacatatagatggaaagcccttgacgtcatctacatacggtcaggcactggttttacaccggtatgtatcaatccttactcagttggtgctgtatattactgtgatctgaacatgtctgctcctgtggctggagctatgaccattaagtaccggtcaaggatatcagtctcatcggcattcagatcactcgcaggtttgatgaaggtacctccaactatggaagagatcaaatcgacattaaaccgcagtagaggtgtccttgctcccggtggttggggaaaaaccacggagattgtaaggaacatggacaaggacagtttagttatatgttccacatcaacggcacaagaggttatcaagaacggcttacttaagggtatgatagttggcgatgaacgtatagaccccaagcctgagttggtggaatatgtttactcacttgagaaagcacaataccttgatctgcctgataaagcgaagatcatcgttgacgaggctgggatgatacggccataccaacttcttacaatgatccgaccgctatcaacgtacacattctatggtgatgacacacaggtcggttacatcgatttcacaaatctgggtggacaagcagccactaagtccatattcgattacttgccaaaacacatgatcactgtgcacaacacacagtacagagtgtcacacccactatgtgctgaaattgacaaggtacgcaatggtggatacatttatgccggcgagtatattgaaacaactgaccgtgatggcaacacaataagcgaaccaacacgcacgaccactttcgacatgactgattattcggattggtccgatctggccatatctaatctcattgccgtgggcaagtatgacaagatattggtgttccacaatgatgatattcgtgcagtggaacaagcatgcaggaaagctaaattatccgtttaccctggcatggtcaacacagtgcacagggctcaaggtggtacgtggaaacgtggtttggttctgcagcacaaataccattccggttttggtgttgaagtgtcaccccgtcattgtatgactgctgcaacacgcttccttaatcacctgagttgggtaacaatcggtatcgagaactacaagggcaaagatctacccactaggatgggtaaattgtctgcgcaaactccaggccatggttacatttctagtggcgtacgcggcattaagcgagcgttcaagagcttcaaggagtcggacatctacggcgacaaccttgaccaactgctcgacgtggcaaaaaccaatgttgaatggaggccaaaaatcgcacactctgtgaatgggtaccgcaactggtccttgtacaacgctatgatcaaaaagtacgaatccatgtatccatgcagagtgtcaattacgcaatcatctgggtatgacgtgataaccattaaggcactcgggctgaaaggcgttgtgcatgtgttccccgaacatgtccaaataatctcagatatggctggccaactgacacagaccaaaatcactgatgccatccaagagtgcagcgaaacgtcatcaactaatagctacgtcagctttgatggtctggttcccaaccatgtaaagacaaaacacttcatgcatctcacaacaaagacagaattcagactcatgcactctgcaactgttgcaatgcaggtcgcaggttctacattccgagtggacgttggtggttgcacatacttgctggctaccaccaccgtgcgcgaaccactcaacttggttttctataactctgagtgtgaatactgggtcaccaacgtgacatctgagccaactgttgtggttagcgaagacgttaccatggatgattccttcgtgaattggttaaacggtggtagctacgcatacgacatagatcaccatgaaattaatgcactcaagtggttccgtaattggtggcaagagcggtacttggagggcaagaagattgccaacatgatcaaacctatattcgatgttgacgggccattcgttgcagaaaatagcttgtactcgactgacatccagaaatcaacctataatgatctttctacagacactgatgtaactttcaatgacagcatgatggctgtcattgacatgcttggcatgccgctacctagcttaaccaatggtgcaaaaactgtcaccatgcttgttaaaaacaacaaagtcttcacagtgcccattgcagcaagcagcgtcagcttgtgtaatttgatcgtgtacaaccacattagttatctgaaactttcatggacaggcatgctgctacgaaacactgcatgggcagggcttcgacctttgcagggcaagttcatgttagatctttccaaacacgtggctgccggggatcgtactgggtcaatactcataaatgccttcggccgcgaattacttactgccgtcaggcacgaacccaaatcattggtgctttacaggcttgaggatgataaggttggcgtcaattttaggaaagaacatcaatcacaacaggtggcatacaatgtcactaccatcccaaaacaatggtcacaaatcaatgtcaacagagctgttatgcacagcctacagacctgcgtaccttcactagatgtgtttgatagtgacgccagcggggctattcaaatgtccatatggcactggcgttctcacttaacaaataccacatgtggcaaccctgagatcatgaaattgttggagcccaacatgtggaaagcactggatggtgcatgtaacatgatgtcaacatcagaagttaagaacgtgaaagaagaagcagtaaaagaagccatggaccgcacaaaagccttggcaaaagaagctgtcacttctaagcttatgagcagtgatggcctaatcactatgcaaaaacgtgctgagtcaatatgctactatccaccatactgcctcaaccaacaacctgaatcagtacatgaaacaattgtaggcaacagtattatcactttcttgccgataccagcagccagcaattggcgtgacaatggtgacggaacaactaccatctatgactcccagcaccactgcacttacaatgtgccttcgtggttgacacagctgtggcatgataaattgatgaatgtaaaaaccaatgaagtcacaataacgacgatcggtacttcagttgggcagctaattctgcacatacacattcggctgcccggtgatgaattgcgcatggtactgcaggacggtatctctgaccacttagttaccatacaagtacctatcatcaataacaacttcatggaagatttaacaaagggtcacatgcaagttacgaaaattaaggtacgagaaagcctttggagaagaattaccatgcgcttgctgcggcctgacaccacgctggctgatctgagaacggccatacgaatgctgcttaacaacaccgagtacatggtcacccatcaaagggcggttgagacggggcttgatagtgatcaaggtgcacttatcgcactcgctgcctattgcatctatcaccaaaaactcaacacaaacagagactacgttataggtctggttgagaacaccgaaacctacttaatgagatctctgaaccatgctaaacggacagccttgggcttgattggcacattgctcaaaatcatgggagccgacaaagaaccagctgccatggcaaaaatcttgggtgacgttctcaagcaagacacttctatgaaccccatatttgatgtaatcaacaattgggacaacctcacgcccaagcatcatgtggaaactatacccatcaagatgatcggcggcaagaccctaacgaccgttgtggataggtctcgcgggttccagcattccggtctctccaacctcatgttcaattatttgaggtatggacctacattatataaaagatcaaaaggtgacacgcactaccccattgccgaaggccgaccaatggctgcaacaccagcacagaatgcacaactcgcatcaaacattggtgggaatttcagcaacaccttgttagatcagatcaatgcacgcaactacagcgagctgcgtgacaacctgcgaggcaatgtgtactcaacacaacagatggtataccttgagtggctaatacgtgatttaacgttatctgagaagcgcattctcaaactactcaatgattacaaatcaacgaagatatccgacaatgtcatcattatggtgaataagctcaacaccatactgcaattgtcttacaattcgggcatcggcgctgattccaactggatacgcgacctggaatggcttacaacgaagttctcaccttccagtccgtcgtcagaggccatttaccagcgtaaccacgctttaattgaacaatgtagcaaaacagtcaacggcgcaacactccttgatgacctgagcatgtatgcggctgtctcagcattaatgtcattggcaaaattaaccggacaaacacccaagactgccaagatatggaataatttgtcaggcatgcgagttgggctagtcagcgtgggctcctatggtgacatgctaccgtttatgaacatggctggtgtgcttgcagaacaaggtgcactggtgaccatgcattgtcccgctgaagccgaaaaccaattccgccgagctggtttcctaacaaaaaccgggcagtggtcacttaaagataatcttgacctatgggatgaactcacccgggcaaaactcgacgtcgacaaaatatctaagtcactaggcactaactggatacaagggcttgacttgcaggatgaccaagacttgtggatatcatcaccaattgcacctcaaggcatagcagctgcaatatgcttctctaggccacacttctacttgtctccattgccttggcaactccaacatggcacacccaaaaccaatgttttctccactctgtctgataccggcatcatcatgatgcattccgaccacatcaataatttcatgctgagccgtaaagccaataaaactgttaaagatgtgcttttggccaagcaagtgatgatgtacacaatcgacactcgcctgaccacgatgattagtgcatactatcaaccaatttcttgtggttaccttggatggaccaaccccatcaataacaagccgattgctaagactggcaccttagtgtcattcggatcaatgactcaagggaaaggcttgaggttagcgtcacttgcaatcagagctttgatcagcacaggccacaaggtcattcattattcaaatgaaaagtacatgactgacgaaatcaaagcattagtcgccttaaaatctgttaaaatggtcaaatggaccggtgattactacaacaatctaggcaaaggttggaccgtggtgcaccacggcggtgcagggaccacgcaatccatatgctacgctggtgctaaacagctcatcatgccagttgcctatgaccagtcatactgggcgtcccaaattgacggtatttatggtcttgcatgctactccgaagaccccaatgaaattgaggcaaaactaatcaggcttgcatcaacaactttcaacaaacttgatgtcactgtggatgagatcaacacaaatgtggagactgcccttagcaaggcatttgaggccatcatgccatctgtgcaaatcctaccagtgaaatatttccactctgatgataataaatcaaatgacgccatactgcacaaggtcggcctaccaaaaattaaaaccatgcccctgttgcctgagcgtggtaccttaactccaggttattacattggtaagaacacgcaaaccctcaacgtaatgttcgacccgtacgcaccaggccgtcgcacggatacatgcggttatgacgtgattgcatgggcatccaataacaatatggctgaatttgaaaaagctgccaaagaactgggggtcaaaggtgatgtttataccgaaaatttcccaacactagggtgcatggtaaaagccaatgtatgcgttatcaccaacaacgacatacaatacaccgtctctgatcaaaggtggccaacaatatttgttagggctcaatctgggcatgcagttattgtatcaccagtacccttggtagatgtacgattcgttgatccacttaaagctgatatcacaggatttgcagcagccgagcatggtgaaccatgtgagaatggacccaacatcaagattgatgccggacacgaacataagcacatgcacactactaatgagtcattgatcaggacaatgcaagtgctgttaactatgggacggtccgcagcaattgacaaccgggcagtcgccaacacagtgctcgaggctaatgcagcagcaaaagtgctagagggcgtgaaacgaggtatcaggggtaacgattgggcctcattggcacgaggcaacggcatgctgcctgcatatggattatcacgcatatcaagcactagcgtcgatggcgtgtatgacataacgggtgaaaacgttaagccccctcaaggtatggtcctcttgcacaggcgcaatggaacaatccatgccaatacagtcattgaggggcaaatcgagggtgaaaactacactttacttattagcactgacacaacgccaccaaaccttgtgttcaatgtgcgtgctaggttattcgtcaggcagtctgattacaaatggtcggccagcgatactgcaggatatgctctgcggcatgacgttcaattggtcaacgcattattgagcacagccacaattacgactgtgcccaatgacgcaagggttggcacattgtacttatacaacgtacacaataggtggcatcatggagaaggtgaaggtagacacccactcaacaaagtcagcatgccggttaattcaatggttattgttccaggtgagaagtatgatcacgatttcatcatatcattgagaacaccgcaaattgtgagcccttcacttatcaagggcatcaaaggttacacactggactggttccaacaatcttccacacgaccgtatttagatggttacgacccatcattgtggcacgacttccctgtgagttatgacgacgatgtttaccagcgaattttcatgaagacccctgcaattagtttcgaatcccgcgcattcaaaacaattaagtcatgggccaataactgggctgcacaagtcacaggggaaggtttcccgctcaaaccatctgcttttgatgtcatcaacaacatcaattcgtttgctagtgacaggaaaggctatgtgaaatacattgatactctcgtaccaatggtatctgccgaatcggccacaactatgtctaacgttaagcattaccatgctatgccaagtgtgcagtatatggagcaagttactagggcagtatacttcaaagcacttaagagtgggtcccacactttcaaggtggaagtgtttgatgacacaaccggtgaatacattgaatccacactcgagcaatcaatcatcaccttaattgagagggatgaccagactgtcgatgttaaatttagaaatgacgcactgttggagctcattcgttcacaattaactggtttgcaaagaccacagtggagttatgcccgtgttgctggcaaccccagcgttattaaggccctacgttcaggggttagcaaatacggacgcagaggcttaacaacaattaacatcggcattggcgttccaataaccactgaagctgtggaatttggagccttgacaaaaatgattaggtctgcagtattagacttggcccaaacagacgctgccaactcgtcctacgatgatcttgattatgatgctgaccctgcagagtatgaacctcacatgcctgcagtggatgctaacaagtttagcatttctgatgcaatcatttatgcatcagccatgtcacacttcgaaaatcacggctggaaagaaacgattgacaagtatattgatgatctcgtttcttcagcgctggaaattgacatgtcaagaccagaacaaaaattcactatttctgtgggcaatgatcccagctatgacgtcttcgtttcgatggatggatccgttggacaaaactgcactatttacttcgaatgtgacaccaatgatgaggaagtagccaactcgttatatgataagtccatgttgttagtgagggcgtacatcgtatcagaaataggcacagggtccattaagtcacctagaggcctgttgcgttcaatattctattgtggtgtcaatgattccgtaccatggttatcagatgatgaaatgtgcccaggcttggatgcagaattatccacatacattttaaataaacacatgagcatgtcaccgccaattcgtagtgaagttgatgccattcaatcagaatacaaggtgttggaagttgttgacactgacaccatgttgataagcactgaagtgatgatgtcatttaacattaaagccaacatttacattggtgagaccaaaaacaacgattataacttggacatccgatatgataatagtggaaagaaggaaacgcgcacgctaactatgagcatagatgaattacttgatatattatcaagctctacacaaatccagtgccctaacggtgttaacttcaaacttcgacttgaggatgaaatggacctatccttgctacgcgaattactacctgaagaagctaacacgttgcttgttgacgatgatgttacaagtatgatggttgcacactttattacatctgacaaaaactctgatggagctgaacttcggggtttcgaaatcagtgacaagtccgttcatcatgatagaactttcacagctaatgattggcccgaggaaggacgaagtaatggattaccatacccagaggaaacgaacgagttccgcaattctgatgttgacaacatgcacggtttaaatctcacgaaagtaatggctcgggtcaatcccaacccaattcaaccagcgcatatcaccgcagtcatgttggcttctggtatattgaatatcgtcaacggttacacaagagtgagttcaaactgcgcggtgcatgacaaattgactctggaattcctgccaatggctgatacatccaagttcaactggatcaaaccacccaccatcttcgggaaacagagagaattggacatgtggtgcttggtaccattaacattaaatttctcgacaccaatccacttgtatgatggatcaagccgcatcataccgacgccacccagcagcttcaacaaatcaattagtttcacgtgtccagatgttggctacccaatgtacctgggcaatactgtgttcaatggagtgcaactatcacggaacaatctgttgcgtgccatgaatgcgggtgccgatatctacggtatggccgattacttcattatgcaacaatacatgttcgccgagagagttgaaaaagtgacagtgttgggtaactggcccgagaatgcccgcgttgttgagtgcaagaattgtgttgtgaaagttagggcacctccacatgctgttgcatccgcaccacatgttgcgatagcttcaaacacgggtaagaaacctggatatgctctacccacgactagaccatggtcaacaattgattcggacaactacgtgctacacgcggcgttctcagttttgaccatcaggggcgtagttgtaccgcgttcgaacaaattgccgcttgaggacatgtcagaaaggttatggttcaagcgttctggattccttggcgcagaaactaacgcacttggagacctactcggaatcgaaataagcaaattaacttggcgtgaattaataggacgctacacgaacggcaaactatcgtgtgtgtctcagcagtatgtaattgaatcgctggacaagattgatgagatcataactccatctgctgacggtcaagtgttactcattccaaaaatccaagggatggtcacaatgggcttccgtggtgttttagaagacaaactaacatcatttggattgccttacatggctgaggatggtgaacccgttgacgctataccaccagctaaagatgtaaggaccatgggcacaacaggtatgcaaatttcatttgagaaccaacccaagaagacaatgttcgctattggcgtaccagttgctggctggaaaacaactttagctcaagaattgccgcaaatattcgctgaccacgacgattacttggatcaagaaaaacacaggaaattgttcttagacggaaacttggatttgttgcatgcattccagaagcaggctttggtaccaaagaacaaagtgttattaacctggggcagtgagaatgtgccatcgagcagggtttaccttgggtccgttatgcatcacaaatcggcccgcgagcttaaccttccggtgccagagtatagactagagctgaatgaaataaacagaataggcctgtttaatgagaacaattacacattggtgaatagttatgatgaattcaaacaaaaatgcttaggcctggttgaggacgcactcgagggcaatcttaccgttagagagaacacaattgagctgggtgatcttgctgacattacattcagtgatattgcaattgatggatcatacggtgagtttagttccaaagatatatatttaccatacataccatgcctttcacatgatgttgtacaggacattgaacctcctgaacaagaaatgacacctcttgatttcatcaacttgtatgaagacaatgatctgactgatctggtcagagttgtggctcccatgtcagaacctttccgtaaaccggtcaggtcaactgaacatgctattcgaattattgaaacggctaaaactgtgatgaagaaatatccaatgcgcacacgacctgtacttacgaaacttatttatggcgaactaaacgcgtctatattacgcatggagtcaaaagaggtcttgaagaaaatacagtgtgaccctgaatatgaagctgatagaatggcacaattgtttttcattaaacaaaagaaatttgaaacgatatcctacaacaccgccgccactttggagtgggtaaaacaacataaaggcagcgaacaacttcaaaaagagttacgtgaattacttgaccaaggtttcttggaagtgccacttaattcagtcaaggtacaccaaaaactagaagccttgatcaagggatttccaaagaaagcaatcggccagttacgtgaacagcaggtaagaattatcgtgtcaatggcaatcgcagtcgctgcaatattcagccccgtattcatcaaagccaagaaaaatctcaagaaattattgaggcaagatgttctgtatgctgatggcctaacaccacaggaacttagcgcctatgtcaggaacattgaatatgatgatgatctcgtcttcgttgaggatgatggcaacaagcaagataagcgcactgagcatgatatgctcctaactgagatgattgtatacaagaagtatcttggtgtcgctgaacacgtggtagacctgtggtaccaggcacacaatgcgtggcggtacaaaggaacatgggtcaggggtgtctccgacgccatgcgccaaaccggccaggccacaacagccatcggcaatgtcatcgtcaacttagtggtccatacaaggcttgtggaatccattggcaatgattttgtggcaatgcttgtgctaggtgatgacaaccttatcatcagcaagagcttcatcgacccaagagcccatgaaaaagatagcaggttgcgatggaatatggtgcaggaatgtgaacagttcacaacacacggaacattcctgcaaatgatagtgggtaaagatggcaatggcaggctgcaggcgagtcctgactttatccgtcttcgcaataggtttgaagtaaccaatggtgtcagcaatgatcctgaagcaacgtttgaggccagatgcctgagttattgcatgatgttgggccaaaacgaacgtggtgagaaaatcattagaaaaatgggctatgacacaaaactaacaacatactacaatcaagttgcagcaattgagaacgttgcagcgaggcatggtgtgaatagagagttggttaagaatgagataaatgatttgtacacaatgatggagtctggaacaatgcaaactaaaacttggacccacttcacgggcaccagccgattttaa

SEQ ID NO: 1205 - DNA, 18567 bp, Ceratobasidium endornavirus 2
  source 1..18567: mol_type = other DNA
atgaataaactgaatacaaacaatcaatcaacacacacctcacctcagcgccaaaatcctttccccgacgctgttgtgagtaccaatatcggggaaaggataattaaagaagtgacaaaactgagataccagtcacaacactggacggacgatgaagcggacgtttacagagttaaaggaatcaggaaaattgatggaaaggtcgaaaccgtttggcccagaaatcatgctagagaagcctcggtctcggattatctagaggaatcataccaacaaggcgtgatcgataaaccgtatgatgggagtaaaagggaaagttacattaagaagattactgaggcagacaaggtgacgcctggaacacacatccacggcagacatttgagccaagcttacacgtccattaaagttaaacggactcaacacgaagacggattacctatccaattcatcaacgaaaaagtgcctccagctgtaaagtacgttgaaattaccggtgacggtgattgttggaaagacctttacgattattgcccaaagtcattgattacaggagttggcccagattccagaatattcaaggatgctggttacctggacgcctgtgcgtacattgacgacgatggtgagaaagtaaccaacacttacagcggagtgcaaggcctcaattctccaagatatttgcaagacgttgttgcagatttgattgaatatggggagttctgggacgatgaatgtgaggataaacagacgttcaagtcagttcacaatcaacaaagactgcatttgattttagaattgaacgaaaatgataccatgcatttagtcgatttcgggttcgacgatgaaagtttgaatgacgacccagatgcatacacattacgtgagttggatctcattttgttcactccttattacattgattacgaaggtttcgaaaaatttgaaaagaagatgcaaacctggaaacctttcttctccatagatgttagaggcatggctgtcggagtgcacggagactatttattgcgcaacaactttttggacaatttagaaatagaagttgatgatgaaaatagccaaaaatacattaatgccatcacagatcacgataaccgagtaattaacaacacgtgggctaggacccaatttaagttcttgaacactgtgcgccctgaccggaaactgacggaaacggccaccaaacagatggaagacatgttaatagtaaaagcttcggattcattagaagaccccacttatcgatacttgatggacgtgtgttctgcttacgcttacttgaatactgattactcgcaaacacactatgacacggtcatttcgtcttatttacgcagacaagaatggtggaaagaacaagtcgaatccaataagattcaacctgtgttgtgttcagttgatccatcatgggacgaaatgctggatcatgacttgacatacatcatttgcccagtagtgggctccgatctatctggagatttgccttgtggcgtaggttcatacaagaaagaagttgacggcagcgtgttgtttgcgtttggaaccagcaccgtcggttacaaaatcagagattgtacaacgttcgctgaaggaaacaatatcaaaaccgtaaatgggaaaacaatcaaagtggtgagccggaaaacgttcgatgcaatgcagataatcgtcgtcacacctctcacattccaccaaatggaaattcatgaagctgaggaaagggttttcgacgtgcctgtcttgattaaccacgcattgtgggtgacaaacatgccgctgtacaaaactgtgagagtgagagtcaacaaaacgcttttgaaacgattaatcaacaaaaatcttaacggcaatgtttctgacgacttgttgatggaatacggcatggctttatcttggtacagttacaacaaacgcggagttgaagtttccaattacaagatcgatcctttagatgtcaaaacgcacgtttacttgagtaaatgcttgattagaagatccaacttgaaagatgaaatccaagccaaactcacaagtcctggttcgacagccacacttctggctgccgctgccgccatgtttgaaacaatcaatgagaagttcgatttagctaacaacaaatttgtcgacttgttgttgcaaataattgaaaagttcaaagtgccagttgtgaaatccaacgcaggagtggctgtgaaagcttgggatagcattgacacgtggacattgagcgagcatttgacgttgtctcactccggcttggacgccgcttgccgacatcacattatatgcgaaaggccttatacaggttacatgtgtattgactgtttggcctacaccgcggaggaagatagtgatttatgtttgtgttgcgataaaggtgattgccagcacgatctgactaatcaagtatctggtcaagaaaaatgtcactgttgcaagaacgacacagaaaccaatccctgcaatagttgctcattggagaaagcagaggaaccggaaaatatcgattttgaatgccatggtttggcatgttacccaagccgacctaagaacaccattgctctggacggagagtaccacgagcacacctgcatcaattgcgagtctacctatgtgcacgcacacccatataggaatttgcagcatcaccaaacgaaagccgaatgcccttattgtggcgtgaaaaagatttcgactggcatgagttttattgcgtggaccagtcatcaaaacaaaaacaacaattacaaggacagagtcgtcaaaggggacaaacctaaacccggcaaaagcgacaaaaacgccaggaaaggtggcaaaccgatgagtcaagctctgcaagaagaaaatgcatatattgagaatgtgtatggtgcgcctactgaagcgtcgcccaagggggaaaatcaagaggactccggggcagtcgatgttgaaaacgtcacggtagaggccacaggccaagaaaatcaaatgcccgtggaagagcccgttcaaaggttgcaacaaattgccgtgatgaaaaacatcaaagctgaagaattggagagtcgggctgcgccgtttgaactgccttacacggaagccgaattgatcagagcgctcccggtcaatgcagttagcaatctttacggttcgagcgaaatgttcgaacttgtttcaacgtcagactcgaaattgtcaactattccattcgttgccctcgaaccaccagtggagcccacgctaaacttttcaacgtcagaggttaccgacctcaaaggaggcgattgtggcttgcaatgcttaagacactatgtcggggcggatttttccgaagcccacgtcaaaaccgtgactggaaaaaccagaggattgacagcaaagcatttgatcgacgtactagcctactatgatttgaatgccgcaataatcgaaccaactggagtgacgttcaacagggtgaatgattccgaatcgttcgcagttgtgtcagacgtggcagctctggctgacattgaagccgatcactgggttgtttgtagaatgacgagaatatccgatgcaagaaatgagctgtggtgtcatccgttgtcgacaccggcccaacacaacgtttctgctagaataagattcgggagagattaccggaaattgacccaccacgaaaaattgatggttggtttcagtctcagcgccaaaaccaaatttagcttaaaagtcaagttggacacgcccaaatacgaaggaggattcatcaccaattctaacaaaacagatttcaagagaggacaaatacatattcaagtgcccgtcaaccttgaatacttgtgcgaagcaatgcaaagatccgtggattctggagagttagatgatgacttaaaaaccgtttgggacgttataggcaacgaagaactggacgtagagtacaatctgaggaacgcgttcaaagaatgttgcctcgttttggcaaaaacattcattgatccggcgtccatgtgtcgcttcaagaaattgcccataataaaagagggcaataagcactttgtggatctaagcaccacaaagttaaaaggatctgacgtgttcatgtatctgacgaactctggattttctagcgccacgatgagttcaagtttcaagaaggtggccgtgacagtgagcggtaatgtttctactgttcaaggttacattccaaaagcctctattggcagtatctataggaggatgcaggccataatcaacacacaagtcacaagtgaaagcttacacaaattgttgagtcaagcccaaatagtcatcggagtgggtggtgccggtaaatcgacatcaatcaagcaatggagagaatcccatccaaatgtaaaggccaggttcgtggcttgcacaagtggaggaaccaagtcgcttagagaaaaattgccagcaaatgatatggtcgacagctttgaagccgcaagcatcacacaatccgacgctgagatggtgtttctagacgaagctactctcatcaaaccctgggagttgtccctaataattaccccaagcacgcaaaaactgacattgttgggcgatccaacacagatagaggctttggacatgtacaaatcaggaggagctagagttgttaagaactgcatcgaagtagctcgcgatttgggagcagaatttgaagagaggtgggcttcctacagatacggggagccgttacgagccgaattggccaaagtaccggctttgcacaaactaacaacaaacgccacacacaccacagagtttgaagtctactggatgagcgagttccacgccgatgagttagtcaggatgttcacaggttgtgaagtagtcatagctttctatcaagatcacgtggaatatctgaagagaattgtgaccaaatcaagaattattctggccgaaagtgtccactcttatcaaggcttggacgcgaaagttgttggggttttacaagctcctaaaggaaatgcagacgtgcatttacaatcaggacacactattagcgccgcaactagagcaaaagaaaaattgatttgggtgtcagtgtcgtgtttctccgccagcgtggatttgcatgccaggattggagctgaagttggtgcttcattcttcaatgcagacgaagttattgaaatgttagcatttaaggacaatgcaaaaatgttagacgttgaagctctcacggacatgagtttcatgcaggtcgtcgacaaagtcaccacgggcgaaagtccagaaaattactccatagaaaacttttcgatagagactttcgcaaagttgatgagccattttacagacaagctgcaagttaccaatcacacaaccaatgaaaataaggacgaagttacctttgcggcaaaatatggaccattgaaagggcttgtaaatgtacacaaaaacggtaccgttaaaggcgctgtcccgtccaaataccacgctcaattgcactctgccatggcatggtcctgtttgttcgggtcaaccactccaatgccaaacttgtgtgaattaaactcaaaaggaaaaagccgtatcaggatcattgctcatgtgagcaaagtgtacgcggccaataacaaagaattgaaacttaaaaacgatctcaagggattcatggtgactacaggcgcgagatcatgtgctgcatgcagtgaagttgttttcaccaggaacggtaagtcaaccgttgtaaacaaagattacttcacgcaaaatcgaaggcacgtatatggcgcggagtccgaattgatagtcgaatgcttgaacaacagcaatgtttggaatatcttaccagactatctcgacgacgacaatctgtccttagccatcttaacagaaaggttccaaactgctttcacggaatggaagagtgctaaactaattgaccaaaatgccttgcattacaacaaatatgagaacgaatggattgccacagaaatgaagacaaagtatggagtgcacgtcgagactagcaaccacgacaacatgtactggtatccgatcttgtttaggaaaggattacattggcatgccgtggactgcagcatggaagagcggaaagtcgtcaaactaaccatgagaaaaccaaaactgaaacagctaatctacaaaaatttgattggcatgctggaacactacagacgcaaaagtttggtaacaatagttgccaaacagtacgtaaaattggtgggagcaagagccaatgctgacaaattaccaggcatgactcaaaccattgcttggcacagaactcacaaaacgaaagtgtacaaaaacatagcgaatagggttgcagaattgaaaatcagcagcctgaaattcgagaaacaaaacattttggctcctacaaatgtgcacaaaattatcgaagagaacacggaatggacgcacgtcttatcgtctaacaggttggctgttggagatgctgccagtcaagccggtgacctaattctggtagagcttgcaaagttggacagcctagggtcgaagaactttgacacttacttaagcactccttacgcaaattacgtttgcaacacgagcaataaaaaccacgatttccaagacccgatgatatccatgcagacatcctggaatttgatggggtctttgtacgacgatatgctgaaaaaccacatgagtagattgcctagcacatctgacacttacaaccaattgcaaaatgagttgcaaacgagatccgctttccacggacaagacttgaattccaccacagttctttgtagtccaggcattacttcaagcaaaaagcaaatggaattcatactcaaagatagagaaaccataatcacctggataccaatggaaagacgagtcataggaaacaacatcatttatttgaattcaaatagctcacgagcttaccccgtaactgcagagtttgacgaggctttaaacaagggagctgtgattaaaacaaaagccggtattctcaaagtgcacactttgagaatgattggggagtacagaataattagaattgacaagagccacaacgagatttgggctagtccctggacgcaagacaacagatacgtgtggttggaagggccagctcttattcttgaccctgaacaggccattaaagatgggcaaattttaaagagggtgaaacaaaaatacaatttagctttcttgagcaacttaagaaggaggctgttgcgcagaggcacagacatggaagacttgaaagtgcaaacgagaactttagttaacacagctcaattttctttaacgaatgtgtacgacaaatatgacatacatgtgcacgaagccaaaagatgcgctgaaatggcaatgatcatacacaatacggaaaacaaaatgtttggattgttggaaggcaatagttggcaggatgacttaaagttggccggcgtgaaactcgtttcggacattctcaccagtgttgtgccgaacaatgttgtttccgaactcttaggaaaattgccaatcgacaaccacaagaacttgatgactttaatcattaaattcttcgaaaaactggaaaacttaagaggtacactaatgaatgaggaaaaactgtttgtcgttcctggtcaatacgtggatgttggcaccattaacttcgtcaacaaattgaagcaaaggttgacagcaaaggctaaagaacggccagtcaagccatatttgtttataaggtcttgtgacgtttgcgatgtcagccccatgagggaggcgtttgagtattgcggaatggaaatgctccacctaggccccaaagaaattgttccaaaacgaggaatcgtatttaaaactgcaaattgtaaacacgacaacgagccgtattgtttaatttgggaagaagtacatgcaagcatgttcttgtaccccgagacaagcggcaactgcccaattataaccaacaccagtcttcacgtcgaaggggaatctttgcaagcttatcctaacgtgactctgtacactgactgtgtggtaacagtccgatcttggaattacatgatagcttgcagcgttgttattagtgaaaacactctgttcaaattggatgatttggcaactgaagaactgagacaactgacgcaaggtagaagcgaagttgggggcgtattgttgctgctgccagctgactccactgttttagtcgaagacagtgggaaacgcattgtatcctctactagacgtgatttttcttttaggaatttgaacgacttaaatgaaatcatcatggaaaacttagacgtaatgaattcgctgcacggtagaacgaagatgcaaattggcaagaaaaatgtcagcttgccgcaagcagtggtggacgttggcgccattgactcaaaaatttctcatttaagaccaaatttggctaagatgttgaacattataatgccgtcatctaccggaaaaggaatggtggctgaaattttggctttgtccaaacccaaattgtctgtcttggattatagtaccatctatagaagagacgaccaccgacagagcatgattaatttattcacaattgccaaagggaaaaaacacgatgtagttctagcttccaacaggccgaaaggagacaagttcgttgcattgttgtacaaatacatgccgcgcaaatacagccaaaaaggaggtaaattcacgcacaagacatgggacaaatatattaaggactggaaaaagacagaaactgcaggcagatttatttattgggaggacgtcgccagtttgacgcaaattctggtggatctgttgggagtggaagtggagatggaagccgccgtaaccgactgcagtcacatagtaatcaaacccgtaggggttgaaatgaggacaggtgacaaatgttgcgagtgcaaaagtgatttaagtgaaatgaactaccaagtgaagtctaaaactaccctggacaaattggaaagatatcgcttgaaaagcccgtgggtgcaaataggcacattgaacaaagacaaaaccattgaaagtctgaaattggaggcgcatcaaaaactgtcatccgcttaccaaattaaaagtgaaagtgcgcgcgctggaattgaaaacaaggatgtggacttcaagaaaaggaagaacgcaacatggcgtgatgcagcttcgctgaaagccgccaacaagtccaagaggatgttatttacattagatgaagaaggtgaaccacacgatagtgacaccgaagataaggaagagcagctagtaaacacttcttacgcaagcagtttaaaacacaaagtagaaactattggaattttcaatgccaaatcatatgccagcaatccgagaaaaccaaattgcaatgaattaggtattgtgacaggcaagtttatcgaatgcgtgttcccgtacgttttgcccctggatcctgtaacggttaataaggccctgccaaattacgttatgtgggctatgaagagtttgatcggaattatggcgtctacatggtacgtgccaatcactaaagggttagttattgaccaaatagaattggatggattgcaattcatcgacaccatcagcaatgactatcagacaggaagaatctttgcaaagagcgcaaaaggcagaggagtgatcaagaggaaagtgttaacaccaggctgtcaagtcgacagatatccaaccataggagaggtgatgcccagaatcactttcattccctctaaagccaccgaagtcacaaagtatgatcacgtgatattgtggtgccccgaatgcaaacaagtaaattcgtggtatgtcatgcctgtggtgactgtgtgcgcgaacaaacatccaatgaaattgatttgtcatccacttggccaaaagagggcttttgaaatgttggagtttgcccggtttacaccttacgacacgctttacacaatgggacctctcgaaaccgagatacgtaagttcactaataattactggtggagtgacactttcgatgacgacgagcattacgactcggatggagacgaagacgatgacgatgatgaattggacaaacaattgtacaagaagactttggacgacatcctgaagaagaagaaagaatccgggaaaacggggagtgacaaaaatggaaaagacgagtcaaacaatgccgaccaatcgggttctggcccctctgaacaaaaagctgcattgcatccggccgtggcagttctcaagtctgaaatagagtcaaaggagcgtactgctcccgaagtttcgcaaggcgaagatgctgagaggaaagaacaactagagagaatgagaatagaaacggaacagagaagattgaacaacatgttatcgaaacaaccaaaagctcaaaatttgaaggagttggatttgctcaaggaaatgaggcaagaagagcgtgcgatagaagagaaggcattgaaagaaccaaaacaaaagacaaaagatgaaataagacgaatcgtgaacacattgcaagtaatagggactgcattcaaagagttgaacgacgaagacgacccatatgaagaagaaattgacatcacctctttaatgaggaaagaagaatacaaacactgcggctcggaagaaatgttgagagttggaaaccacctccaccaaccgcaatggaagaagtacagtattggaaaaactccagcgacattcggagctttgttgcgttggttggcttttgaacggccttggggaacaccgctgtcaaacgcaaaatgtaatcattactcttggttgaacgaaaaattaaacagaatgaaatctgttatggaagaacgatggttctggaacgataacatcgaaatttcactgttgaacgtaggaccgatacgtggagatggttgggagataacgactcaacaagtgttcatcagtcgaccacaatctgaacaagtgatgttgtccaccttactcatggcacattccgctaaatacaacgacaacatatttgcttcagtgcctgggaatttcgttagtattcaaccggaagctatttcttttgactgctgcattcacgccgacatagcggctctaagcactgacgttgatgaattcagtcgttctggtctacgagtgcaatggacgcgaaaagagcgaagtgcgcaatggaaagaaaatgctttgatatgtccagattcacaaatgggtagacctttagtaatagttaccggtctaaccccagactctaaatgggtctttggatggtgttccaatgcatgggatatcatgagaccatttatgtgctacgcttcccacaacgttttgcaaccgacggaagcctttccgatgcacacttacgtaacaccagtgcactcccggaggtttagaaggcatttggttacatggccaggagccgaagatgaattcctgaatctaagaatcagtccgctggcaaacgcgcctatcaatctgtacccggttggacagggttcatatttcaaatcaggtccaagatacgacaaagttttatacaccataagtgagttgacctatacaccagactggggaaagaagaacaaatactgtcaacatcaagcagaaaataaattcggcgatgtgcttgcttataatgaaatcaatttttgcgaggtgtgtgacgtcatcccggtaattatgatgaggaaaaataagaatttggcaatcccgaaagacgttggaaatttggtggcaaggatactgatgggacaaaccacgtttgacgacaatgagcaagattggatcattaacactttgggaatagacaaacacgtgttacacaaaaacggtgatctgcccaatggcatagtcgtttctagcaaagaaaacttcttgaggtgggagaaactgcctacagatgaaaaagacgaagacgagccagtatgggtggagcttaaatttgaagacggaaaaatggtagacgttgatcgagcattgggtggttcagctgaagagatacgacccgtgtatgattggacagacgtgcaacccgagccacgaggctggttcattccggagttgttgttcgaatgggagccagtggaagcaatagaaatgtggaactcaatgatggtcggagcttacatgagtgttaatgacttgaatgcattggccgccgaaaccatgatagatttttacgaccacatcatgcctctggaaagaccaatacctttatccgatggaggtgaccgagacacttgcgacgaagtttgcgtcaagaatcatgcacatagcttgttttgcatgatggcaaatgaatccagcatagagaaagaatacgtagactgggttgacgcaaacggtggagcaggcaacaaaatagttacagatcttatttacaagaagggagctgaaatgggactgcacatgtcaaacacacctacgaaggtaggaatgcaaagtggggccgctggaacaatagagatagcttcagtgattaagtctagaatatcatcagcgatggttgacctggacagatttgaaagaaacaattattacggcgaaggcttggaattcctggctggagaattggcaagagatcgcagttacgacgccttaaggcagaaatcccctcttcgattcatactcggacatttacatccagtgaatttgaacaaagagttaataatgactgcgatggcacacaaaaactggaatgaagaacaagttatggcatggatcacggattcggaagaagttcgcgtcaagagcgacgtaagtgaattttacgcattgatcggttacgacatggataaccgaaattcaagagatcggcgtgctataggaaaaagctggccgttgaaaactaccaacccagcgcgacgaattaaggaaaggaaactatttggttgcgcagtaaagaaattaaagaccaaaaatatcatgaccgccgttaaaaacactgatacggttgcagttaatgaagtcacagccgacaaaggagcgaccattgaaaccactgatgaggagcaatggtttgacacaacaacagttcaagacgtcaaagaagaaatggcaacccaagagactggaacagatgcagatgaacatttagacccaaagttgatgtcagaacgtattaaagctgaagacaaaaagaataacaaaattgcaaacgcacaagaactggaccaggaagagctaactgccaacgaaaagcatttcattgaatgcatggaaggcctggaaaacaatccggaatttgaaagaaccggcaacgtgtggcttgaaaatcacatatgtggcaattacgaaaggccgatacgcattcacaacaacccgctgtttagtgacagatacaaacaggggcgcgacttaacaagctcatatacgcacatggtcgacgtagcttatacacgaccagttaaattggccaagcaagtggtcaaggcattagacgcacttcaatatgccttgcagaaattgtacattgaaaatcaatcaaccgtggctcttcacgtttacgcactacacactggcgtggctgaaagatctccagccgactgcgatggcatgcatttggcttacacaactgaaaccgaaaaattcgaagctctcggcttcaaaaccatcaaactcgctaagaacccaggcagattgggggctgtattgcggaatttaacaatggcgctttggccgggccaaggttgggttatctcgcatggagggagagttacctatcattctctctattgtgaaaaatatttaaaacatttgaacttgacgcatagataccaaagtggcggagcagaaggagacctgggcaacaatttgggaatttcagtatggagaaccttttcaccttacatggactgctttgcaagaagcactccgaatagttatttgaagtcagcaagctggttgattgcatacagcagcatatacggaatagatgaggcaaacatgaaagaattcgacggggaacattacatttgttttgactctccatacaattactctaacttaggcccaatgaacaaaatatatcaaacggtaactcggcgaatgaatatagaaaacattccagcaaagttcgccggttcagaagatttcgacaggtcgatggtcatagaaagcggccgtgacatggtcaactacctgcccttggcttggcaaatggatgacaactctattaagaaaaatactaggtcgagtagaaaaccaaaaccgtcaaaagagatcactgcggaaatggacagattgagagtcctgaaatttggggctctaggagcgttgtcttcaccaaaagctttgactccaattgaacaaatgagaaaagaggcacaggaaagacaacaagagttacaaaaattcgtaattgatacagtgaagatcacaaaagacgttagttccgccagcttatccgtggaagattgtctgacagctataaccaaattagtgcttcttgaagaccaaggaagccttgaatcagctgtaggcattgatttcctaccaggtgacaaagctagactgttcacaatgtacaaaaacaaacctttatttttaatagagagcgaggcaaatttgcaagactggaacgtagtggcaaaaatgtacaacgaaaggaagctgctgaaggaatctcccgcagccaaagctctatggaaccgtactgatataggcaaatcgttgatgatcgtggacaaaccgaaattggaactcggaaccgcaccaaaaataacggaagaagagaaatcggccctggttaagagcgcaaagagatcgacaaaattagtccaccaatcagacgtgaaacagacggtaaaaattagaagagtaactggcagcaacaaaaccgaatggatcgttaatatgaccaaaaacacagttacagctggcaatgaagccgcatctgaaatcacaagagccgaaatcgacattgctttagctaatgaaatgctgagacaaatttatgctggtttggtgtctgctggatctgaggaattgatgttgaatcatcattacttcgtcaaaacgcaagccggaattttggcaatcacacacaatatctggcagacatacggaagcggcatgttcgtctcaaaagctttagattacagcagggtggtagaaaacttgcacagtgtgtggacaagaaaagaaacaatcaaacatcaggaacaatggaaagacatggagtggcagtcattaagagacaagttctacgagttctccagcaacaacaattcgtatgaaacgcaaggaacaataggattattgacagagaacattgaacaaggaatcaaggttgagtacaacaaatccgaaattatggaaagaatatggttcaacgctgaaagcacattggtgtcaaagatcactctcaaagattttgaaaccaaagttgtttatgacccgaacacaactgctaattgcgccatgatgtgtttaaaatatttcttgagaatgcatgtaggtagagatgtagctaacgacttggtatccatactgcatctgagcttctatgaaagagtggagaggttgtccgaagcactgacttcgataaatctgccccacgttataatacaaccgacaggggtagctaccggtataattaacgaaataaacaagtcgattccaatgttgttgctggaagtggtgcaattacttgaaggaataagccatgtcagagtagtggaagtgaaggggaaattggattacaacgtcaggaaaatgaacagcgtcaaattgtctagcgaaatcatgtcagaattcgcagaatatgcagaaatgtcaggaaaattgagtgattgcatacaacatgacacggattttacggacgcgtacggagatttggaaacaacgatatccaaagccgcactcgaaaacatgagaatcagatggagaggtaaaccaaagagtgggctacaacggaatgacaagttagtttctttgcaaattcgaaccgtacacggcaccgattacaaatccattcaaggttgcaagaatggtgatgtgtacattgtttacacaaggaaaggtaaacaaccattagtcactgtctcaaaagagaaaggaacaacgtttttgacaaagatggatgtgggagacatcaatggtgctctattgcttggaaacataataactaaaactggcacaaagaaaacgatcacggacaccaaaaatagacaaatagggtttttgaatcaatccgacaaattggcagctgcatcgagatttggaagtttggcaacgaatccagtcagggccgacctacagaaaatagctttcacgaatttcagcaaccgcaatcatcacacaaaagcagagcggaatataattctggaaaaaggaattgacaacgtgcttgttttagacaaaaatttgaggcggatggctcccgaagaatggcaaatgatcgaatgctctggttgggtgagggcagtcttcgtaaactcggagttgacaatacagaaagtcagcagttacgacgtggacgtgtctgaggtttcacaattgttccatgccagtcgctttgaggatagattgaaactcttaaaggaatttgaagattgcccttgggtagtagtaggcaatgatttgttacctgaagccttgcctgagcagattaaaaatctggatgacaaagaagtcaaaggcagtgtgcttgccacaatattaaaaagcgcttcatacgatgtggaattgaaagatgattccacttatcacgtaaaagtcacaaagaaaattctagacggacctcgaccaatgaagaagcaggtaagcaacaaattcgtcagagatccaagatttgccgcggaaataacgttcgacaaaaagaactatggttacatggactacgcacttaaagaaaacgacagcgtaagagtagatgaaaaacttctagataatttgaacacgttagatgaaatgtcgaaaccaaagagtcacgacaaattgccagtgctggacgaccaagtagtgtcgaatattcacagcgtggtcagtttgaacaacctagtctttactgacgaaagtgactcttacttgagtctcaaaacagaagaccaacatgaagtggttctgtatggactagccacaacaacagacccgatcaatggagaagtttacaaactgccaactgatcccagaaccatgaatcaatgggacgacgagacggctatggtggatggacgaattgaattgccttatgataacattaaacttcaacacagagaagaattcgacggagtaaagaaagtgctgaagtccgtgttggcagagtacccgtctcacagccagccggctcacaccaaaaggtacctagcgggactacaagctgtgtcagatttattcgggaagaagttagttttaaggcaagtggagcatgatcccgttgaagacgctagattgtttgccgacacttatttcagggctggcagcactgcggccttgccgaacattgggttagacccaaacaagattttaaattggttggctgaaaggccggactatattaagatatctcaggacatgatggatatgctaactaacggtctggacatcagaggtttggacaaagtgaacgttcatatgaagttggagagtcggctcaaagacgcattaattggatccaactctgcatttgaaaaatacattagtgacaacaaaatgccggaaactatagaagagcaaagaaccagactgattgtgtggcaaaggaaaggaattgctgccatattttcaccatttttcaaagacctaaaagacgctttaaaaagagtcttacgcaatgactgcgtatacgtggacgggttaacccctcaacaaatttgcgctacattaggaaatatagacggtgacgacgtagtgttcgctgaagacgacttgaaaaagcaagacaggcaaaccgaccacactttaatagacacagaaatggaggtgtacaagttgctgggaggcaacgcctcaatcattcgattgtggagaaatgtgcacaaccattggagagctagaggagtgggtgtcaaattcgtcggagatgctagtcgacacactgggcaagccaccacagcgctcggaaacgtgatcgtgaatttgatggtaaaatgcagaattgttagagaactgggcaacagactaaagatgatgatggtgttaggagacgacaacataataataacgaaacctccaataaccgaagaaatgatatcgcaacaaagtgccagacatttcaacatgcaaagcgaaccctctgtggacccgatctcgggtggtttcctgcgcatggtagtctacaaatccaatcatggaaaattggaatgtggacctgacgtaatcaggctgaggagaagatttgaagttttgaatggagtcagtgaagctaacgatgaaaatgttacaatgcgtgcaatgagttactgcatgatgttgggcgacttgaagccggtacgagagttaatcgaaaaggaaaagtggccgatcaaccctagcagatggtacgacttccaggctctggtaaatgctactgcttacaaatataaatgcacagcagagcacgtcgaaggggaattcaacgctctaatggagatgctgaaagaaaggaaagtgacaaatgtagaaaaattaatgttcgtgggacgtggcaattaa

SEQ ID NO: 1206 - DNA, 14907 bp, Ceratobasidium endornavirus A
  source 1..14907: mol_type = other DNA
atggacgaaggggaatgggagacgaaaccagagaacttctcctacgcaaacattttgcaatgcaccgccgacaacggcacaaagtggaagccagctcctctaaagaagctcatcgacgttgtgaaacggtacaacgtttgtactttggtggaggcaactggggaagaggacgattatggagagccgatcatgatccccacgactaagtggttttcgaaacccgagaacgccaagaatttgctcattcgaatttcagtcgtaaacaaagagctattgcatttggaagaatgtttctacactgaagatgagagtgagtggcaggccgctaccaatgctggatggactaacctacaggaattgcacgaggagctgcgaaaactcgacgttaaaccaaccacgcctgagattccggccgtcatgtctgagcctgccccacaacaggcaaaaccagatgatgcgcagcttctgcggcagttgcagtcttgcgcatcagaagtgtacacaagtatatccatggatagatatttgagtcagaaccaggttactgtggctgctgcacttgttggcgcaccaaactcgctgttaaacaacaaattcttccaagatttggacttcgcgacggacggggcacatggtgtagagtatctcaaccgtattacaaatcatgacactagagtagtgaataacactttcgccagaatgaagttcacgcacattaaaacttgcagaccgtctaccgagtacgacatgaatgccgtgtccgacattaacaacttgataattgccacagatatggaatcgcttcttgaccccaacatgacgttcctgttggatattgctgcttgttattgttacttgaatattaaccctgacaaaacgtatataacggacgaagttaaattgattttgggtaagcaggcgtggtacgacgcccccgttccggacgagcgattgtgccttctcactctggaaccgactttcggtgaatgcttagaccatgacttgacgtacgtgattacaccgactataggcatagacaacgacggacgattgcctaataatctgggatactaccgtagggtcgacgactatgttctcgtttctttcggcagttcgagccacgtattacgtgttggctggtggaaggggctcgccgctggagaaaaccgctacgagcgtgatgggcgcggcgttaccgttgtccatagaaaggagttggggggcatgaccgtactttgcatcaccccacttgtgtacgacagaattatggttacagaggctgaagaacgtacttttgaagtacccatgctggaggccggatgcttgtcacgtattggcattccactcgtgagatcggtgaacgtttcgctgaataagacattgctcaagaggctaattaataagaacctgactggtaacgtaggaacagacgccctgatggaatacggaatggcactgtcatggtacagttacaataagcgcggagttgaactgtcaaatacgaagattgatccgtctacggttaaaactcacgtgtacatcgcgaatgtattagtacgtcgacagaaactacacttcgcaattgaagattatgccatgacgcgcggagttaactcagctattctcaccgccttgtgcgcaatggctgagaacttgataggacggctcaatctggcaaactccgtgtggatggaagcaattaacagtattgtggataacctcgcgttgccgaacatacggtcatctgccggcacgaaaattctcaactgggactcaattgatgcctggactctgcgccgcgagatggtgcaaacctcgtccgggttgagatcgctatgttctcaccacacgcattgcccgacggcccacaccggattcttgtgcatctgttgtttggccaatactgcattagaaggcacgtccaaatgtccatgctgtgaccattctatgggttgcgtacatcgtggaaaccgaacaacggaaggaaagggaaaatgttcgtgttgtggtgacccaactaacgacgaatactgcactagatgcaccccctccgctgcgtacttggacagtctaacctcggaaaaagccgttactggtagcacgacaaacggtctcaaagtggcgacgctggatgacggaaacgaggtgatagacgtttaccctactgacaccttggatttgggaggcggtatgcacaggcatacatgtgtagtttgcaagagaccctaccagcacaagcacaatttccacaaacttaatcaccgacagtacctgcgcgagtgcccgcactgcaacgaatccacccctaagcccgaggacgttgctaaaggacagccaacttcgaatcggaaaatgagcacaacacgacaaaccaacaaactggtcgatacacatcctcagggccaggaggcaaccggcccgaaacagacagccacgatcaagagcgccacagaaaacatgacgctggccgagctttgccaagtactgccaatgaacgccgtgcacattttacgcaacgagatcaagcacggcgagttggtatctacatcccccggaaagttatcaaccatcactttcatcaacgtaccatcagccggagagccatcagagctgttcgaagtatttgacgtgacggagttagccggtggcgactgcgggctcgagattatgcgttcatacgttggcaacaacttatcaacgaacacgaccaagtcattaacgactagatcgtatggatttacaatcacagatttacatgccgtgcttaactactacggcttgaatgcagccgtcgtgaacgagtccatggtgacattctcgagagtaaacgacactgaagaatttgcttgcattgtgacaggctcctcgatagaggaatctacctttaaagagcactacctagcctgcaaagtgcgccgagtgaaacccggaaacaataagctgtgtgcagccgccatgtcaacggtagtcgctcatgacaacatgtcattgacaatgtacggtaagcgcatggagtcgtgcacgctcacggagaaattaaacgttgcatatgttctcgccatcaaaaccgaggttcaaatgaaggaaaagattgctttgccttctttggaaggcgatatcttatgcaacggacgcatccatgaccttgcgaaagggcaataccgcttcaaaattccacaagagatgttgccatttgtagcatcttttatagatagtattacaacgagggacgtgaatgataatctgctgcaaatttgggacgtagatgaaacaaacatttgtgacgttgaacataactgcaaacatgctttcgtagacgtctgcgccaacttggcgaagacatttaaaaatccagaaattttgtgtaggcgacacaagttccaagttcgaatcattaagggaagatcatatctagacgtttccaaaactaaactcaagacaggtgatctagtattcgccacaaaccggggtgaacacacccccttgattgtcactgtatccaacggattagtcccaattgaactcaactccatcccgtcactatcactattgataccgaagacgagttacgtcagcggcataatgcgtctatactcatttgtcaccggggttttgagcaccacgcgattgcatgaattgcttgcaagttgtcagctcactattggttacggcgggacagggaagtcaatgtcactgcaacagtgggaaaaagaccatcctaatgaaaaagcagtcttcatcgcttccactagtggaggagtgaccagcttaacgaaaaaactgaagtccaagcaaattttctcgttcgagaaggcgacgtacatgaaaccagtcgccgattattatttcttcgatgaagcaactgtgttgtggccatgggaaattgcccttatagtgtccggaaatgccaaagaaattcatttcctaggagacccgctacaaattagtgttaccgactttacaacgtcttacggtggaagaccgagcatagacatcacttcatacttgatcaatcagttgcgtatgacaccaacgaggctagtagtcacttaccggtttggaaatccattaatcagtgcgctggccaagcacagtgcgttagctgacctcaagtcctttagcgaccgagccacaacaattagcatgttatactttgacgactggaacgcagaccagctgacgacggcactcagcggacacaatgttattttgacgcactacaatgcccacgtcgagaggttgcgcaccatattagctcacagttcagtgactaccgttgctacaatacactcttaccaaggtttggaaaatgacagagtcgccgtcgttcaagccccaactcgtggttctgcagacattcatctcagtctcggtcataacgttagcgccgctacgagagcaactcagcatttgacgtggatatcaattggctgctttaaagactcgcccgaacttcaccagagacttggtgaggtcatcggcgcattgcaaatcgactgggatgaagagaatgagtcttacaacgtggtaatccaagatggtgagtctagggacattactattgatgatgagatcgtcgcggtgagtgaaggcaccagacccgttaacgtggacattcgacgctttgacctggaaaaatgcgctagcttaatagcacattacaccaacttggccgctcctacagccgcaagaatttcaggagacacattatacattgactttaaagttgggatgctacaaaagcaagtttcctactccaaaggacatttggatgcaccgataggtgacaaatacaagtcgaacttactaaccgccattgagattagctgcaccggggacattaaagatctcgttagtgaggttattcaagtggacgaccgatatcgagtcaggatactcgcatacgttgcgaaatgttaccagacttccaacaaacgacttctgctgcagggaatgctgcaagactttgaagtaaaagaaatcgacgttcgtagttgtgctgcgtgtgcagaggtagttttgagttaccgagggcaggaaactaggatatccaaagattacttgcggtccgaccgtcgaactgtaaccggaccacatgccgcactggttaaagaggccctcgaagtgagcggcaagtgggacattctgccaattgaattggatgacataaattactcgcatgctatactcgccgaaaggatagacgtatggtttactgacacaccgcgaggtctagtctcattcggcaaatggatggatcaattcaagtatgacaataaaagttacgtaaaacatttttcagcgaaagccactgcacaagtaaaaacattggaagttgaaaatatgacatacgtggctcttaaagtttctggaatgctgactacaacgtatacagacgtgaatgaggacgggcaagttgaaacgatgaggtgtcgacgtttcaaagctcctacaatgttccaactcattgagaggagacttgatttgatgtaccgcctctttgtaagggacaagaaaatagttcctttgatcgccaaggtttacatgaacaacgtaggtgctatcgaccgatttgagggaatggccgagtcatttgagtggcacaagagccacaaaacggtcacgttcaaaaacatactcaagacaatcggcatgcagaaaataatcgccctcaaggcggagcgaaaggtcttgtacttgcagacggaagtcgctaggatatttaaaaacttcttgagcaccgcgaaggttgcaaccaataaccataattgcatgggtgacccatcctacattgctgccgaaatactgttggcatacctagcccaaaataacgtgaaccctgagtccacacggtatgtgtttgctaccccctatgtaacacacgagctggagtcacaggtggtaaatgtggttttaaccacaacgcagaggaccgctgccgttgtggggaagaaatattacgacgagaccctacgcaaccagatggagcgagtagatggtgctagcgacatttacaaacaattgctgaacgagttagaaaaccggtccacgtggaacgagggtgaccttggatctgcgcaattcgtgctcactagccctgacatgatgttcgatgaaatggtagaacgtagaatagccagttcaaaagtgcgaacagttatcacgtggttaccaaatgtaatcttttatgttaacggaaacccattccgaaaatttgtggacggaagcacttttgccgtgcaaacaacgaaccaatttgaaaatgccgtcaccttcggagaaagatggacttacgcaggacacacggtccgggtgcacacaatgcgggttttagatgggatcaccgtcataagtatgacttttggtgagttgtctgcatgggcttcaccttggctagaaaccgccggcaatgtatacctcgacgttccgacattgattttgaatccgcagagtatagttgatggcggacgaattctgtctaccgaaaggaaattggtgaacctgacaattttgggcaacttgcgtagacgtttgttgcgaccgaatacgacattagaagacttactagtacaagccagaacactgttgaataccgcccagttcacgacgaacgagtatttcagccggttcaacgtttccgtgtctgccatgatggacacggctcgaatcgcttgggctattcacgagaatgaaaattacgaattgtcgttattagaggttaacgaatacggttttagtttgaatatgtcgttagctaacatggtggggaagctaaccaacgcgcttatcccgacaagtagaattacagctatagttaacactctcgatgatgatatcaaagtaaatttggggaggttactgacttcctggattgagaagatccagatgttgacaccggtcatgatgaaacagaggaagacattcatcaatttttcagacattgaattgcccacatttgacatgagattacttaagtgggtgaggaaaaatttcgtcagcacaaagcgcaaagctgcatccagagagttggttactttgtcgacttgtggcccgtgtagggcacaaaagcttaacgacgtgcttaacgcttttggttttgtcgttccaaacgttcgagagccaagtgaaggccaaattgtcgctcacacaaatgcttgtatagatcataagaatgagcatgttgtgttctacggtgacctattcaatcaattcatgaatggcacgtctttcaagggctatgccctcgtcactgccacacaaacaatctcgaacgacaatgatgttgttttgaacgacgtgcgactcgatgacctgctaaagagatttgtaaattgcaccgtgagagtagaggctactggatttgaatttataattgctaacattattctcaattctgcaaacacaacgtttattgttccaccagatttcaaatttaatttggttaaattcaagacaggcgtgcgtttgcagcgagctggatcgcaggacaacatagcttctggaatagtgctgagtgacaccttccatacgctcgtgactcgtaactggcttgcctacagaggcttgaacaacaggctgccgggcgttgatttaagctctttcaccgacgagagccctcgcgggacaacacccaaaaagaaatccaatgggaaggaggcaactggtacagcacaaccaattggttggccagggaccgacgagtttgaacacagatatgagttttctagtcagggaatggaatttaatgatcatggaatagtggttggggaccgcaccatacacttcccgccacacatgattccaaatttcttcaacaaattgtcaccctcgagacagcgacatctccgtctgcaatggggttcagccgaagggttgcccgggttcgtgtatgacactgagtgctacgatgagaccatagaagatttcttaattctgcagccgcaactgcaaagtgatggcaccttttcggtggcgatgtccggcattctcgacacggaacgtacgttccaacttggtgaaatgcttaactatgacctgcacaaaaatatattcaacaaaaatggaaagcaggttagcaccgaaaaagccccgaagatattgcaacggtcagtcactgtgaagtcggaacattacgtgtacgtttgttctaaatgtcgcagtgcgtattccttcccgacacttttgaagaatgccgtttgcactaacaaccacgtcgtctacgttgcgagcggaccacacggcttggtttcgtattcacccattgacttcaatatctccgagcagaactgtagtgacgaatggtccatagaatttgtgacatcacagagcttggtgaacgaggaggtgtaccggccgattttctccgagcactccttgtttgatgtcctcccacagctgggaccgatcgaagtactacctttgaggaaaaattttgacggtaggattactttaggcgaattcattcatgctttgatgtttgacgttcgtgatcctgattatccatatatgggcgttgaccagtacatgtcattcgaaggatacgactggttgagggaccgattgcggcaggtagggaaaccaataaccgctgaagaacatgcagagaagaccgaatacattagttccatccccgtgtggaagctcatcgagttagttaatgctagaactgggcagcccatgttgaagggcatgggttggatggtcactggaggaatatctggaacaatactgacgatggccgaccttggttgcacggtcacagttttcacttcgatgctaacacttgccctagttgagaaaaatccctggatactattcagctcgcccgccggcttcgagaatgtaaagccgaattggttggatttctcctgttgcacgggattcgcgtacaatgtggctgggaatgaaaacgacagccgaaacgacatttgtgctgcccggactaggacatcgaaattgtacagcacgggtcggtcgcttggacttgagttagccatttgtggagacttgtcctatggcatagcccaaaacggatggaactgcatacgtccttacatcgcagggcgacgccacggatccagggcctgtgaaacgcctctcccagtggatacgttggttccgatgataaacaatgtttattacttgcatcacttcacaagttggccaggagcccaagatgttgagctaggcctaagatgcacacctcatcagaagggaactacggggtcagtagtgttgcaaccaggatgcatcctaggggagatagatcatgagttacttgacgacaatgcctattacgaccgcgaccattgggctagaagttggcttaagaccggtgaatgtagatggaatggaaagaaagtgaagcatgtcaatttagcgtttaatagtgatggacaggaagagagattgaaattctgtggctctggccgtaagtgtgaactgaccacttatgacaagacatatagcgactggacgcaagacgtaaacttggttcaaggtatgactaacgtggactcgttgggcgtggttgcaaaattgacgtacaaccgaaactttaccgaacttgaagagcaatggttgcatcgttacatggggaagaatcaggttaaaccctctcaagtagatgaatctttggatgggccatctgaccacgagctatcccaagatgaggaaggtggctctggccgagccccaagctcaatgagtggcagcagtcctgacgcacgctcacatgcaagcgggagcgatgcaggaaatggttggtacccgatggacgagggccgtggttggccagctgcggacgatccttcggcggaacaatcgtattggctgaacgccgaagactcgcctggaaggtttgagtcttggaaacttgaaacctacaacgttactgattctcacggtgagccggtaacggatgataatggtgcaccgattcaacgagtcaagtggatgccgaggaatggtttggacttcggagacgtggatctgggcttgaacgttgcaggtgaagtattgagcgtcgaggccgatgaggcagtgccgatgtcgtatctacacggcaatcctttaacgggtggaacaacgtccgaaaatctggacatgtactacgacgaaagcaacattgatgacaggtggaagaaccgccaacacaatcatcatcttgctagtgacgaatggtccaaacagaaaaggcaggcttgggccgacaaactggagtctcgcatatcgagtgctacacctgtcattcacattgggcaaaccggaatgatgcccacttctcacgcaacttcggtcgctgagagtccacgcactccttcaatgcaaagcaatccggctgatgtcgtaccgggcacgatcgtgcaagagtcctcggaattaatcaatcagagcgatttggaggccgccgaaattaagaggatgatcgacgaagcttccaccggtgagcaatggttatttgaccttttaggttgtgacgctaatgacacgataaacttgcccagttctctgctagacgagttggcggccgccgattctggagttgttgaagtgttcaactctagcaagctggcttcgtcagttttacacggacggtacaaacacggcttggatttgacgaacaccgagtcaacacactttgtttcggccaagctgagtgagatcaggcgcgtgtcgcccattgggctgatcgccttatcaaaattacgaagcatcttatttggattgggaataacatctgaagacgttgtccacttgtacgttttgcacgaaggggttgccgagagaaacacctcatgcaataaaggaaagcacgtcgctttcaccaccaacccagaaaaataccatcagcgcggtttcatcacggtgcctttagcgaaagaacctggccgagttggcgcggtcataagacccatagctgcgatgctgggcccaagctgtaaggcttatgtttcgcacggtgggcgagtaaacatgaacagcctgtggactgaacacgctttagaaagatacattagcactgaaagcgttaattttacgttgagtccttggaatagtctgagcccgtacatggacggatacgttatgaagacaagaccgccagaatgggcaagattcatctctatcaacctgcattatggccaagtgtacggcatagacgaatacaacatgccaatcctaggaattaagaaatgttatggtctcacaacgcacaaccggatgtatgcgaacttgcgcttgcacccaaaatattctgagctgctctcgagcatagaatttgcacctattgaagatcccgagagtgtcatgcctgcggtgccgttgtggattattgagttgtcgactcataattctgctactatgcctcttgcgtggcatattgacgggagtggattcaaaaaagagacgagagggtggggagtgagctctcacaatgactttgaaaaatggtttgcctctttcattcaagagcccgtagcaggactgagagtcaactctgaaaaaggggatccagtaaatccttcactaactcaaggtgtcttgcctaacgcgcaattcgaagaagtgttcaaccccccagtcagcgcggactgcatgaggttatgcattaaaaaattcttgcgcgatcatgaatacattgatgacgcacaaattttagataggatgaacatcccagcatattgcaatgctgacgttgtgcgtaaagaactattcgctgaagggatcaactttattttgtatttctccgtcaacgacacgatgatgtccgagtcttacaccgcccaaataggcactttcaatactggcccgacaattaacctacacatcaaagctcagctggccggtatgcggcatgcaatattggtgaaacaaccagacttaactcgtattcggaaccgggaggaaccacacgttatgtggccggccaatgacaagcaagggtacgagtcgctaacttcgagattgcgcggaattaacgaagctgtattgaccggtgacaccaaagatgaacgtctcgccgagttcgaggtatcgtcggtgataaacaccgtgtacagggccaagggacgcattgacatgatcaggaagcggcgcagagataacgttgtcacaacgaacgctgtcagagtgttcggcacaaatttcttcgtgctcgctccagacatgaaaattggtaatggatctctggtcatttaccgtgactcaactggttgggtgcccagcattgttatcgagcatggtgcaaaatcttacatggcgacgaacgatggtgtggtcccgacgtacgtgatagtatcaggtgccgctttaacccctccccaagtggggcagtccaaagctggacccggaaaatcagtgattcctagcctgcatccaaaaccaatcaagctgagaactggtttgaagggcggatttgctacaatggccgacaagaattgggccgttagtcacaaccacgctagtgcatctttgaacgttaacccaaaggccgacgttgtgtgggtcagatctttcgacaatcgcccacaccataatgatggtgacctctattcattggtcaggtcaaaaattccgcagaatctgagaatcttgagcggtgagagagagtcagaaccaacgccacgtgagctgatgagtcttaaattagagggcaagtcgtttgttacgtgtatcgttggaggagaattaaaaattaatgtgctcagcgactacttatctaagcgtggttactctgccgttaacgacgagttgacgaatgacgagatgattgctttggtgactgcagacgctgagtgtaaaggagatgcgtacaaatttttgatgggcatctggacggatcgatttgagagagcaatgcaggacggagatgatctgtacaagtcaaaagatgtgtcgttggacgaaattaaggcgaatttaccactcggttgggaatttactggtacagccagaacatattctgcaatcgtgtattacccaaggtgggaagcaaaggcgtcaaaaataacgaacaaatacaggggcactgatttcttcgacgtaagaactgggctatttttcgaattctcggaacgaagatacggatacatggagtacatacaaaaagaggttgacgaggttgtcgtaggcgaaaaaatcctcgacgaactaaatacggtggatcaactggccgtgaagaagccgaaaaacgagtacagtggcggacttgaccatgatattgagcaggcagttcgtagtctagacttgttgaacaacttgcggtacgatgacaaatcaagtgagtacatgatcaccgcaacaaacgacccgcagaaacccgctgtgctctatggctgtgcaaacatgggcgacccgataaacggtgaagcttacaacatacctgcaagcgcaataacctacaattactgggacgatgaaacggcgatggtgcctggtccaattgaattgcccagaaacaacattaagctgcgtgtgagcgaaatgccggaaatcatcaagagcatcgacaaagccgtactcacgaactatcctacacacgctcaacccgcctacactagaaactacaacgccggattcaacgcagtttcggagttgtttgggtcaaagctaaacgttaggcaagttgagcatgacccaattgaggatgctaaaactttcgccgatacgtatttcatacaaggtggcgccactaatttggagggagttgacattaattcccaagacgtgctaaattggttgaaaagcagagttgacacccatggagctgaagaaatgcataaaattgccgctgagatagaggaaatattaagtgaaggattagacgttcacggaatggacaagtttaaagtcaacatgaagaatgagagtcgcatgaaggataagttggcagaactactaacgatggacttaccgcaaccggataacggcatgccggacactataaatgaacagcggataaggttaattgtgtggcaaaggaagggagtaactgcatgctttgcctcttttttcctaaaaattaaggaaaacttaaaaagagtgctcaaaccgaacgtaatatacgtcgacggactgaccccgacacaaataagtgccgaacttaacaaaatacacggcaacgtcacgtttgccgaagatgacctaaagaaacaagataggcaaaccgacgacacattgatagctactgagatggaggtgtacaagcatttgggtgccaatccaaacgtgattgctttgcgccgtgccgtcggtagaaaatggcggggcaaagggataggcttgaagttcgatggtatagattgtcgcaaaactggcgaagacgtaaccgcgatcggaaatgtggttgtgaatttaattgtaaagatgcgtttagtaaaaatgctaggaaatagtctattgttgatgttggtgctcggagatgacaacataataatcacgacggggcacataacaaacgagatgatctcattaaacagtgctagacattttaatatgataagcgaacccaacgtgtcacaagattgcggtggttttctgagaatgttggtgtatcaaggacagtccggaaaccttgaatgcgggccagacgtaattcgactcaggaggagatttgaggttactaacggcgtttcaaacaacccacaagaagtgattaacatgcgtgcccaaagttatgcatgcatgcttggcgatattcgaccggtacgagagttaaaccttgaaatgggatgggatttgcaactgagccgatggtacgattggcacagcctggcccgcgctacggcttgcaaatatgcttgcacggtcgagtatgtcgaggctgaattggcctcgctcataaaaatgatgagggatcgaaacgtgattatcaagtcgaagctcatgtttacctctcacgctatgtga

SEQ ID NO: 1207 - DNA, 17235 bp, Ceratobasidium endornavirus B
  source 1..17235: mol_type = other DNA
atggcgcccaacactcacatcactaacatcaacaacaaccaaaacacaatatctacttacaaacacacaaatcaccgcgatgctgccgcggtgattgtggcctctaaccaaggccatttaaagcagcaattaaaaccaatgccaggaatgcttactaatcaaggggaaccaatgggttaccggatggcattagttaaaaatagctcaacaatgattactggaaaaaatgaatatttaaataatattggcattgggagcaaacaaggaaaacatattataatcaacaaagcctttttaaaacatattgacaatgagaaaagaaaacaacatgtttcaaataaagtacgacaagaatggaatagggctaacaaacaacaagaatttaaaaacaaaagtttgcatttttcattaacttttagacaaaaaccaaaatgtgaaacacggatagctaaagaagtaatagaattagatccagcaggatatccaactgcggtagtaaaaagggcattattaatcgcattacatccagacaaatttacattttacgatataaatgaattttacataagcattaaagaattagttgaaacgcaacaagctgctaaggctttacgcctttgtgttaatttattaaaattagtgccatatactaaccaactgaaagttatggatgctaaattatccagctactatggagggatcacgaacataaatagtatcaataaacaatctgttaaaaagaaagaacccataactgatacaaaaataaaggatactaaaataagcaacgataatttacaaacgaaacaagtaacaggatatggaaaaaattataacaggaatacaaaaaaaagaaaaaacaagacggataaaaaacaaataatagcagagatatcaaagcaggcaccaccaataaatgaagaagcaaacgaaacaaaaataatcgaaacatgcccacaacataaaatatacgatgatgattgtgcttattgctacgctgaacaaagaaaaaaaaatattgctcgtagattagaggaagaagaattaagggtaaaagcccgcaattgtaatggtgaaaatggtggtgtgccaatacaaccagttactgaactggattacaaataccataatatgaactcacctacaaacggaaaaactaaagttggcaatagtacatttaaaatagaccgacaaccgtatgtagacccaaaactactaaatgaggcactatttgaattgctacctaattactcagactatgatactaaatatgatatagaacatcggaaataccatatatatgacactgagaataaccaatcttgcatctctattatggctgaaaagttagggttaaattactctggagaacggttgattaaattacaaagggaaatgcacactgaaaacataaccgaattgattgtgaacatagaatatcatggtaaaggtaaaaataagaaaaaccatctttcatttgaaagtactaaaaaatcaaaattatatttactagaatataaaccagtatgtaatggtaattgtaagacgcatttacctggtaaagagcatgcaaccatgacgaatattctaactaatgaaaatggttattctaggcttagaactaggcaaacttataacaaattcatgtatcggaaaagccgcatgtggagattacacaagaagtgggccactgaatacgcggaatacagggccgaacatggattagatgatgataatgatagtgtaatatccgatgatagttatactaacgaaaaaacaggagaaactaatcaaaataaagtttatgaaataactgacataaattatcatttaattgaaggttggacaaacattttcgtaaatagtgataggtctgatgaaactcaaactacacataataccaatgttgtaacccaaattgcaacagaaaaaaataaaacacaaggacataagaataagaatttaagtgaacttaaaaatacaatagataaaaacctaaataacaacgaagaaatacaaaaattaaattggcaaggaatattaaatgatagtttattaagttatacaaccgattactatgaaaaaattttaaataatgaaggtgcgataatagacaaaccaaacaataacctaataaatgatgataatattaaaaagcactacgaacaaatggcaaaggaaatgtattacaatccggacgtaaatattgctacaaaaatcgaggcattactaggaaaatgtgccgaaccgccaaaaataaacgagacatttgagggatcattttgttatgatgagaggttattaaatatgacaaattgtccattaaatatagcagacgacaggggaacatgtttaaaaatttgggcatacttagaacgtaatggagaatgcacatgggctagtaatgaaaaaggaatgtatacaggaacaaaaagaattagtaacggacaattatataaattcttcggcagttacttacgtagaactttaggtaatatacaacaaacacaatgtttccaaacactaaattgtggtgatggatcttacgtattaaattcaattccaatacaactaggtagtgatggtaaatttataccaacaacaattaataatctaacaaggacaagatttgtatggtgggtagattgcaatacatgtaaacggaagaatggtttcatgccaaattggccaaaacacgcaacaccacaattcttagagcatctacgatgtggcaattgtataacaccattatactacaataattttgaaaatacaaaacgcgaaccaatagaattaaaacaacggaaactacaaggattattaaggaggttgggaataacacaaaacctctttgaacacatagaagtttataagagtgcaaaatggtcctctaatgtagaattacatgaccatgcggtagtagccagattcctaagtcaaataaatattcaaccatttaaggtagatggtaggttaacagatggtcaactatcatatattaatgccgcttttccagatttggaaattattgggaatacaatttctgggtcacattctagtggactatatgatgccataagtgattgtttactcacaactggtatgaggttatttaacaacaacagtataaattacaccgctaataaacataatatcatagaatttgaaaaagaacttaacattgttgaagatctagataacacagataatgggttaattgactgcaaagatagttatgggcaaaacaaattaatagaattaatgcatataggcgttaagacaattgcattcgtaacaccataccaaaatgaattcgaaaaggctactttcggtccacttacaaatgaagttggtgaatggcaaatacgagatgattgcttagtaatattaaggcatgatgaaaatatagctaacatacttgattatgatttaactatcaaaatagcaaaaagtgatatcattacttgtaataacgcctacttagtacgtgatataaacactataggcggattaaaattaagagtagcaactaaagttccaaatattgagtttatcaaaaatctagtaaaacacaatgacgctaaaacaatggaattcactttaccattattagaaggcagaagtatcatgtctttaatgggaggcacgggcatcaaactagaaacatttactgtccataagaaattactaagaacattattaacacgtaatttacacaaaggtgaaataagttaccaagaaatgattgtagcggcaataggttttgcatttaggaaatataacttacaatcaaggacaataggcaattttgacattactttagaagaagtagtatcacatgcatttttagcaacagtactaataaggagggcatatgtaagacggcaatggttattggatattgttaatacagaatatgactggattaccgttttaaaacaaattggattaactctagcaaatgcgctattaacaacattatctgagtcacaaggctacactgctacagaaaatataaaacatatagcaaattcaattaatagtattggggtcacaacactaagtgacagcttaggaaaaactaattttgatgaattagaaaattggttagataacgatgaatataacacttatgagataagtaatataaatgaggttaaaaacacattgaaacacgcatgtgaccaccattctgttaattgtaatcacattggacataaaaaatgcacatgttgtaataaaccaacagaaaatgaattatgtacatgttgtgattatataactccatgtgtacataaatgtaaacataaacatatattggatcatatatgtgtttccaaatgccaacataagcagttaacttgctcatgttgtcaagtgaaatcatgctatgacccatgccataactgtataccattagttggataccataaagatatatatgatgacttattagaagccccatttgcagtagaatctaaacaaaaggaaccatggaaagtcaatagggatagaaagccaaacgaaaagattgatactaaccgaacaccaggcacaatatattaccatagtgggtataaaagattggttgtacaaccaggcagtgacgctataattatggatgatggggtgacacacaaacatacatgtgctatttgtggtaacgattatattcataaacataaaacagataaaacaccacatgtaaaacacccacaatttgtaggtgattgcccagtatgctggccagtaggactagctgacccatataacacaacagatccaaatgatgcacgtgtacaaccacaggtagataaatcaacagaggcaattgatgaaaaggcattaactttagaattatacactgccttgttaccgtcacatggcaaagaatttttagacatgctattaactggcaaaattaatcaaaagttctatgataactcaaatgcaagcgggtataacgtaaaaatacctttcctaccagaaggaacacatatgtggcacaaagattgcatggaactcgatagaagaatacaaatgaatactgaaggtattacatgcggtaaagatgctcttaaaaaattttatgagcatacaatcagtactacggcctttaacacagcagtagggaacggtgaaaacatgacagagaaagattttgcacgaattgctaaagaattaaacttgaatttagttttacttacggacccaacaattactatatttaaatatcaaccaaatgacaatttcaattgtattatgcattcaagctttaacaattcgatcaaccaacattgggaacctgtgattgtaaagatagtaaagctgggcccaacaatcattacaaagaatgaaattgtgaatatgaatagcattagaagattaataaaaatgcatacaaaaaatcaaaccaatgaatggacatggagtatgtccgacttgactaaattacaaattgaatgggatttatacacgacttatactaatgctaacccaggtggtactcaaatagaagatacaaaaataatcgaaaacggcgaagatatgtacttaactaacaatgctgcaggacaacatgatttggtgaaaggccaaatcaatataaaggtaccaacatgggcaaagtctactatatttgcagggtaccaaactaacgcattaactacacctcaattaactgctatattcaatacaacacatactggtatagacaacttggaaaacgaacaactagggctactggtaaaccatattaaaacatattataagtgcacacacatgaacgaattaagtggtacaacattatcactaaaaccaatacatgtaactgtaaaaagtgatcaaactagacaaggtgctagaataaaacttccaacaactaagatatggaaagcgttagacataatatatgttaagacaagtggaggtaagtacaatatggtgcacgtaaaacccataactatggaccaagtgtcatatacacttgtaaacatgcaattaggaagaacagtagacatatgttataacaatgaatcagctagttcagctatacgcgggatatatgcctgtctaacatacaatacaaataaaactcagttaaaattagcattgagtagtagtaaaggttttataggcccagcaggtgctggaaaaacaacaagaattgtagctgcaatgcataatacatctgcagtaatagctgtaacttcaggtgcacagagagtattaaaacagcggttagctgatcaaaataaagacccaaataaggtatttagttatgagggaatagctagtggtacacaacacataccgaaagagataacagaattgtttattgatgaagctactatgttgaggccaatagctataagccacataataagcactgaaaggaggtatgaacatatcacatttttcggagatacaagtcaaataggtgtagtggattttagtgatcaaggtggcgagagatcaatagctagtattttacactcattgagtaaagaaaatttagaaataactaataaacagtataggatagcagaaccattatgttcaattataaatgcaactagagaaggtggatatgaatatataggaccaaaagatagaaaaactgaatatgttgtagaaacttttagtacttttgatatggatgctattatcaatttagttaaacaacatggtgtacaattaattttggacccacataacgcaaggattaacgcatatcgacaaaacttaacaggtactaccgtacaagaagtaaatactactcatcggtaccaaggaaatgaaaaagaagtagttttggtaatacaagaacaaataggtaatacaattgggatagaacaaaatgctagatactgtcattccgcaatgaccagggttaaagacaaattaatttgggttagtattggctgctttgcaccacatataacattagataaacgtattggggttgtgaaagttggccaaggagttggaaaaatattgactagactagggtttaatcaaaattcttactgggatgatattttactaaatttatctaaactcgatacaaaattcacaagtgattatgaagaacgggaccttatgagttctaatgaaaataataggtttagtatagccgccctaaaagcaacggctattaagtatgaagaacaatatggtgccacattaacagccatacataatgatgaatattcagagataaatatttattatggtgggttcactattgctaaattcaatattgacgataatctaacagtgacatgcacatatgacaaattcaatgcagtaacaaaagaacaaatcagtgaattaaaaaataacttaaaagttgacacgaaaatcaaaccaactacaaaatatagcaatatggtgaatggcgatacaactataataagaagaataaacatattggcacttataacaacaatgtttgaggcaaatggtttaaaatatagaatactagacgacgagcaaacttatattattaccactagcactgatgacgatgaactaagtggattacaagttcataaaaataaacaaataatattggagataagttcagacccaataaatacaaattgtagattattccattggtcaaaccaagatggtgaaaggtttgccagaaaattaggcttaatatctggtgaagatgatcaatatataccacacagtctaaaacccttattaaatgacaacagaaataataacatacatactaatttacaaataaatagggccataagtagggctagtgtatttgctaaatctgtatttaataaaataatgccaaacaaatggggttataaaaatattaataataaccaaagtgcacaatatttaaatgaaatgcaggctactttagatttaacaacaaatattaaaatattaccaaataaggaactaatcaaagggatagacatcacctcataccctataaaaggtcaaaatgaaaataaatataattacctatgccatatgaaaccaaatcgagacgtaattctgctaaacactatagacccgtgggctgaaactagcccggaatgcgtaaatattattgaattcacagataacatacttgataatttattaaataattatattggtaggacattaaataaatttagcaaacaatttaggataaatacaaaccttaaagggatagatgggttgattatcagtatagaagaacatattgccgctaatgatcgagttggacaattaattggacaagaagaaggtaggctgggttcaatacggttatcgatgctagatgaacctattaatttgccacaaaatattgatgatgaaactttatcaactatacaaactgcaatgccatcacttgcggctaataaattgatacctgcaatgcctatgcatgacaacaatcatctatgtgaccaagtaattttattgggattgtggtcatacgttggtagggaacctatgactatatataacacaatgccaagcataatattaatgaataaaatgttcaattgcatagctacagactcaccatataattgtactaattcaggattcagacaaacacattggccatggtcaacaatgttattaaagcaattgagcacaatacacgtacctgatggtgaaaataagcgggctttaaataatgcaacacttgtacaatacgcttcagcaaacgtactaaataaaagaggaccctggattacagatgctaaaatgttaagtgaaaacaaaattatatggatatcacccttatacttacccgaaaatttcaaagatattgtaacacttataaatacgggaaaagcaatttatacctacttccctggacatgaactactaaaacatgacggaaactatgatataatacaaaatcaagctcttaaattaaccataaaattgccaaactggttcacaaaattgataattgatgctgaaccaattaaaatctcagaaaattgtttcttaatcgcaaaatgtatgtggaccactgcaggcacaatgactactagattactaacaaaattcatacaaccaggaaaaacattagttctaagtccaccattagtaaacccacaagctagaatggttaaaataactttacctgtattcaaccctgatataatatcgaacttgacccataacaacaatttacttactactagaacagtggaggtaccagataggttactcagacaactaagattaacccatgcacgtgaaggtaaaacatttacagacttatgtgcaacagcacgggtcatgttaaatggtgagcaatttacagaatttaacattagaaatacatataagacttctccttccgtggcattagacacagcctatgcagtagtaatatacgatggtaaactcatatcaggtcttaaatccgctatgcaagaatggtaccaaagacaggaaccatataatccaagtactgaccatattgcatcaattgcagtgggagccgctggtagattaatggaactatccgggttgaacagcacaccaaaagaagtattacggctaatacaaaacctatcatatggtaaaagtgataatatattagcacgaatattggatgaatgggataaattagatgtatctatgacgcacacagctaggacattaaacatttacactagtgaaggtgtaaaattaagtcaatatacacaccaagaagttacaaaagcacgtaccataacaaacaaattaagaccatacatatatagtaatttaaaatacttaacagttttggtaagagtaaacgggccaacagatatgtttatggaaccgataagcacaccagataataacccaaaagcgattaatttaccaaccactccggtttttaatgccacaatagagcaattattaaaggctttacaaagcaaatcatttgacataactaaggatgaagaagcatataaaacaggtctattaagtgatacaagaataaatgagttgaaacgaaaattaaacgaattaaccagtgggccaaaaatgccaacccccacacattcacggccaacaacaccagatccagataaaccaaatacaaaattggattgggataagattaaattatggttacaaggagtaaataactatatacaaacattagaaaataagagtcaaaccgaacgactatgccaagagtacattaggttggcacaaactatagaacaatttaatgagatggacaacataatatataacaatttatatgagttgagtaaagaaacattgtttttgtatgataatgcaaattggtctaccatgcgagataatataggatcattattaagtaaccatggtatacagctaccaagtttaactgtcagcaatttgaaggggacacgcatattaattacagcgctaggatctaaaggtgatttaagaccaataagcgccatgttgaatatattgaatgcatgggaggctaatacatacatactatgtccaagagaatggagacaacatatcgctggtacatgcaaaggaacagttatattgacaggggaatggaatttagatgaaaaactagctactgcattttcatttaaagaattaaacttagaagtattaatgaaacaattagagcaaggactagggcacaactgtattaaacataaccaccacgcaatattaccaacaatagatatattcataggcatgggagtggctccacaagccaaattatatgcacatagatatagggttccgtacatcgaatttaacccactaccatttaacgtaggcggtgataatgaacgaccaatacaaacagctattaggaattttacatcaaaccaaataatgttacttaatgaaaacctacttaccgaagaatatacaaaattaggcggtggcgaacttgatatgcgcagattattaacatgggaaaacccgacaattcatgcatacgatagtaatcttatcaaagatttaccacgcaataagtttggttacaatgttggatatatggcaggtaagttagttgatgaacctacccaattaagcttaaggatgaaaaataaagacatattattcactcaaggttctatgaaccataacaaagttggtaatatggtagattcattgcttaatgctataatgcaaccagttggcacacaatatggaaatctatatatacaatgtggaaataagttagatgatataaaatcaatagttatgaaatacggaacagcaatagcagttaacacatatgccgcagctggcaggacaatatatttaataggtaacattaattacgctaagagtttaaagaaaggaatggtagttatacaccattgtggttcaggaactactacagaaatgctcaaagcaggggtggtacatattgtggcaccagttgcatttgaccaaaacatgtgggcaactgaaattgtaaataatggggtgggcacatggttgaatgactatagtagtgcagcattccaaagcgctttagctagtgcaattggtcttaaaggagcggcggcaaatacagctgatttgccagtttcaaaaccagttgaaggatttactcgtgcttttaataagattatgaatgatgtttataatttaccaattactgctccagatatccaagaatacatgatattcgatttatctattggaaaaacgacaattgatttcaccacgttaacatcaaggatactaggaattgagttcattgctgcggaatctgatgaacttaacaacgtaccagcaggtgaattatggatggacaatttaccagactcaacaactgcatatgacccacctgtaaatggaccatgtgtatttgaaagcattcaatgggctaccaattgtgatccaaatgatttagataccataggcaaatacctaaaatttgataaaccacgtgaaaatggagtggccccagatgaaatacatcttgtaacatgctgcctaggcataaacctgatattgagaactggcagtagggctgaattatatcattatttcccaggaaaacagacaatattcttaaaagcgagtatcgggcattgtgtagttgcacaccatgaggtaataaactgggacgcaggaatcaaaccagttataccacaatcgcaatcagccatgaacccgtttaacattaccggtagccatttaataaacaataaagtttggagtatacttaacaaaaatataggtttggataatattggatgttcacatttacatggtacgcctgaaaacaatctaaaccatctacgtgtattactagataatgttgcacctgacacaaatgaacttgataaaccaaaatggcaacaaaaactaagggatatgttaggtagggatagtaatgttaggctaaaagatttaacaggtccaagcaacatgcacgtacttgcagatgtaactatgacggataatttaattacaactggcacaatcataagagacaacgcatatggttggctgtgtgataataacggacaagttataagatgcacaacgcaaaaaatacataatataacatacataataccaccagctagcttctctagtaggaatatacctatgttattcatagatagtggtatcaatattttaagcaatgcaacagctagaacaacaattaccgatattgacccagataaagtatgtgctataaatagggaaacagttattttagcccaacagtatgcaggagcaagtttacgaatatttaatgatgcaaacccggcagaatacttactaatatgcgagtacgacaatatggcacatcatgcatacaaccatagagatacaataaggttatatgaaaatacaaaagtattgtatctaaacaatgaacataagttaatgccaaacgtagggttaacaatgaggctacaagaacaaaatttcgtacgcgcaggagtacatgatacaagagaatgtacttttatatatactgacaaacctgaaaagttattaagttatgtaaaaagaatacacccacaaacttgtatacattcaaaatcattgcgtatagatagagttgattatagggacatagatagtgaacaattaatacaatggcataccacaaatactgacgaatttggtagagtcgtatataacaccacaaacttacagccattacctgaccaatttgattctacattgggagaattaaaaattgaattagacatgttaaatgtaaatataaacgcaaatctattgaacaaactaaccaaagataaagataacaaacaaagattcatattacggaaatgtggtaacataaaacacctacagatgtggcacaaagagccaaaatatgaagggggactaataatttttgactataattttgaaacatacattctacatttaaacaataatagtgtagtaataaatatggaaaattataaaacctgggcacaagagatacaaaattgtaattttataaatttaacctggggcgatgatcaaccattaccaagtaactctacatattgggttactaataacgttgaaaaagccactataggggacgataagaattataagcggatatatattgattttaaaagcataggcaaaacatatgaagaatgtattgtagacttattctttgataatgaagcagcagtagggttaattttagctgatgactcacaaccaatagaaattggagatttagaaataaatggccatttaatggcaaagagatgtacactcatctatgaaaactatggggttaaaatgacaggaaaatacgtggatgtaattgaagtgaaagcatccagctatacaagaaaatatacatatgagagatacgggccatcggaaattccagaatggcttgtcgatcgatatgaggccttacaaaacttaaatggaatggattacgcaaattatttattgcagatcgatgaagaatataaaccagagtataaaaaaattggagaagaagaagcaatagggttagggataaattacgatggtaattatgaatattacactaggccgattgaaggcgaaattatattagataatatagccactcaaaacccaaacttcttattagggaaaggtattagatggcatcaggtatataggtgcgtgggcacatactcacaaaaacctagtacaatcgcaaaagacataattaaacatgccaaaataatagatggaaatatagtaccacattataatttgatagtagctagcgatttcgacactgtaacagttgaaaattgcataatattggatggaggattcgataaagatgacttattcttattatgtttatggatgacaggaaaaaatataaagatatcaaacataacagagcaactaactggattcaatttaatttataacacaagtgacgttactgaatttgctataaatgattttaacaccagaggacttgatgatagctgggataaaccaacagcatataaactagcagaatttaacgcagtggccgatttaataaggttttcgcaggtagaacaggataatgatgaacgtattaaacacatttattacccatatgctatgttatcaaactattggaaagtcgatgataatgatataggcaaacttaaatggttagatgaccaaaatgaacattccggattacacaatataactgaggcaatatcttatctaggttaccaaaggttatggggaacaaatgattatgaacgaccatttaagcaagacacagacaaaacatggaatagtggattaggatatgccatgatagaaaacaataaatactggtggaataaaacaacaagcggttacactggatatttaattgatgaatcagaatggaatcaattaaatggtgcaagacgtgcatataaaatatcaatatttaatacacaacacagcttagatgaatatagcaataaagtaactatagtgccggaatctgggtggatgaggataggtggctctccaacatttttgcccaatttgtaccaaatgactgctgctaggttgaaaggtactaaagttaaacaaggtgaacaattaagggatatgtggtttagtgataatttagattattgggaaaaaccatacgattttaggaaattgccaaacgacaacgaatttatgatagggtggaacatacatgatactgaaaaacatgaaaaacctataggggcaatctacataccagtgggagaaggtaaaactacattagctaagaaacaccctaatatattcgtagatcatgacgatctattagatcaaagagaacacgctaggctacaaggcaaacccatggccttaagccaatttcaaaaaaatgtaaatgtcccagcagggaaaatattattgacatggggaccgagcactacaccaaaacatataccagctttagggtcagtaactttacaatcagcacctaccgggttaccagaagacaggagcagatttaaccaaagtaataggttgagtgtgcggttattacaaaacgtaccacttaatattgctttagatcgtaatgagcacgaaaggatatgtttagatatagcacacaagtatatgccagggctggaagtacatgaatatacagctagcgataaacgcaatatagcagcaatggctgaacacacattcacagaaaggtcatatgacggttatccacaatatgacaatccgttggataagtatgtatacctaccgtatatagcagttgatggtgataatgttacaccaaatgaaagtatcgttgaagacgatatacctatacaaatattgaatttctgggatgattatgaccaaactggattagtcagaattattgcaccttcaacacctaataaacttaaaaagccaaaaacttttgaacaaccaaacaaaataatcaagacacaaaaattaactttgacaaaatacccaatgcgtagcagacctgttaacacaaaaatggtatatggtgaattaaatgctagttttatacgtatggaagatcataaggtataccgtaaacataacctaaatgtgagggaagaggtagaaaggacatgcgatgcatattttacatcaaattggcgagaattgagtaaaagtttcccaaccataacattaaatgatgaagcaacccgtgagtggttaagaggacgcacaggagttaagaaaatagacaaagaattagatgaactagaagctggaggttttttagaaaatggcgttaacagctttaatgtacaccaaaaattagagtcactacttaaaagcaacccaataatagattgggccaaacaacaagttaggataatagtatggcaaatgagagggatagcggcaatgttctcaccagtattcatggcggcaaaaacacatttaaaatcactatttggtgataggtttgtgtatgcagatggttgcaggccagatgaattatccgctagagtaagattagttagcagtgaaaatgtttatttctttgaagatgatttagcaaaacaagacaaacaaactgacagacaagtactagattgtcattattatatgtatcaaaatgttttacgggtacatcctatggttatacaaatatggagcacaggaacaataaaatgggattataaaggtatatttgtaagaggaatgtcagatgaaaaagtacaaagcggtaccgccacaacaggaattggcaatgtaattacaaatatgatgtgtcatagacggatggtcgaaagggcaggtaaacacctcaagcttatgatggtgttaggtgatgacaacatggctatttttgaaggttataggccgaatgatagggagttaagagttgaaataagggatttctttaatatggaatcaagtgcggaaacaactcaaacacattgtgtatttttgcaaatgattataggaaaaggcaacaatggaacatgtgcattggggccagatgttataagattaagaaataggtttgaagttacaaatggtgtttcagctgacccggaatcaactataaacgcaaggtgtatgtcatatttgatgttattaggattaaatgaaactacattacaaataataaaggataaaaattatccaattgaaccagtaaattggcatgatatgacagcttcaataactacggcatcacatagatataaaaaatctgaagaatgggttagaaacgaacttacgatgttatataattatttaaggaaacctgaaagtataatgaaagaatgggaacactttaaatgtgtctaa

SEQ ID NO: 1208 - DNA, 16224 bp, Ceratobasidium endornavirus C
  source 1..16224: mol_type = other DNA
atgaacgcctacgcacaacgccaaaccgaaaccaaaattaagggcaggacctcccagcccgtcgcctttacaaagacacaaatgcgtaaaaggggaattcaaaagacaaagaactgtctacgaaagacatccaacaaatgtatgggcccgccagcgaacggccaaagcgactggagcaagaaccacaacaaatacactctcgttggatgcaacacgcttatgctagttgagccgcaaactgttgaaccacaaagcaacttgtttgaaatgcatgccctcgccgtacgcagattattgaaaaagaaaaccaatacaacacgcaacaaaccaacgaaatgcacgaactgcggcccccttgtctggttcgaacattccgatgagcagtgtcccaagaagcaacagccccctaagcccggaatgaagggccaatgggttgatggaatctggacatcaaacaagcggcttaagcgaatgcgcagatggaacaacaaacagaggaagcgaatgtctgtattgaattggaggaaacactggaacgcaatgatggtcaagcagttaaacgcgggacccactttagctagcgtgttgcggctaaattgctcaggcgaaaactacaatgccaaataccgtaagtatttcggcaaggctgctaagtacaccgacaaagaaacttccctgatggacatcctagaaaacacccgaagattgcacgcagagtcaatagcaatgctggagtcgaatgagcccatgaaactgggcggcacgggcgactgctggaaggttctgcccatcccaattgatttcgagtcaattctcccaccagtgacagtcaattacgacaaaaaggtgtacaaaaaattcatggcattggtctcaatgcgcatgtacacagacgtggcagaggccgcctttaacatgaatctaccgcagaaatggatagatgcgtggagcagtccgttggagatctcagtcatccttgacgctattagcgaagcagcagaccaagccgtaataaacgaggaggagggcaaagatgtcgaagtgtgctacaacggggagatgatgccattcctagatctttatgaggcacctggcgagttcaggctgtcaatggctattgagggcgagcagctaaacatgcatattgaaagcatggacggtgaaggagagttctctctgaaggaaatagaagaagcactaataaccatagaagacacccaacagttggacctgccaaacaagaccagacttaaagcaattctgggagttgtaccaggaatattccacaccacctcaatacaaagtctattgaacacaggtgaagtgctggaaacctccaaatggaaggccctagttgagaacagggacctaagggcagctgcattggccctggccaaggtggaccaccatgtgtatagcataccaggatgcggagaccgggagacagcagaaaagatgaacaaccccgacaaagggggttgggcactgggaatgaacgtacagtacactaacgaattgagcccaaacagttgggtgcaagcattccctgaagccgcagcagtgcacataagcagacaaatgttcagcgacagaccagtcaagatatacgccaagccgcaatggctaaatcccacagaccatctaaacgcaaaggataaagcaaaatatagcttagcatttttcaccgagacaagcttgaacgaggccaatctccaaacagctttaaacggctgcaggcaaatggtcgccgtcctgccaacttacaatgaagatatgccgcatctaagctcgaacgaggacgggaactacctaatgaggagagttgcaaccgacttagaagttgttagggaggacagcacccaagtgaccacacacaacgctgacataattagcgcgctcaataagaaggatctgctggtaatagggggcaaactctacaaagtgacaatcattggcacagtttgccatgacaccgtggtgagcttgaccctactagaggggaccccgaaagaattcagcaacatctttgctctagaccacaacagcacggttaaaaggtacacatataccatgcccaaattcgacgccactctagggttcatgatgcctactttcgagactaggacagtggacatcgatgatgagctactgagagtcgtattcacacacaacctgcataggggagacctggatttcagaacattgctaactcgatgtatcgggttcgcgcacaggcgataccacatgaagcactccgtgaaacaaagatcagacctcagcccacaacagcttattgatcatgctctgttggcagcactattggtgcgtagggcttacgtcaccagaaggtggttggctgatctctccaacagccctagatgggcacaagttgcgataaaaggaggctttggactggcgaacttagttctgcaggctctccacgaacacagtggaacataccaaaagttcgaaagctggatggagcaagtcaccagggtatcaggcagcgccataaaggacttcacaaaccaggctgttttcggcgaaatagaggcgtggatgttcagagctaaaacgaaagcttgggaatgttacagcgtgggaagcaagtcactaactgtgtcatgcctacaccatgatgattgcacacacacgggacctatgtcttgtttgtgctgcgggcagccctcgaacaggcaatggtgcacatgctgctccaggcaactatgtcggttgtcacatagttgccaacactcatgtagcggcaaccacaccggatctgaggtgtgcacatgttgcaatatgcccagtgatgaaccaggcacgtgcaaaaactgcaaaccagcaacagatatggagtatgacctggactacgaatgggatgagttcgttgagaaactgaaggcagagggtggcaagcctgcatcgaactctgcccaaccagtgctaccagaaggcatgatcatgccatctggaccctgttcccaattgtccaacggacaatatctccacaaatgtgcactgtgtgacagacactatagttacatacatcccctatgtgccaagaacccaaaccatttccaaagtgcaaaagcctgtccacactgcagcggaggaaaggctcagaaaactgacgaatatggtatccctctcaaggacgaacccaaagaaataccaggcggctggagacctgcggctgaggaagaggacaaggagccatctcccaggagtcgcaacgtcgtggtattgttgaagatggggcacactctttcggaatgcttggccatcgcaggcagcggagaatcatacaacaacctgtacaattggcagggtgacacctcaatagagctgccaatgataccgtatggcactcaaagctgtagagtgatcgcgaccgatttcgaggacaaattgcaaatccaaagaggagttacttgcggactagcggtgctgcaaactctaaccaacaaagcaaacgaagctgatgccacaatcttgctgaagaagtccgacacatacagttccggagatatggtggccttagcggaagcatggaaactcaacctcattcttttagcagaaaaggaaatagtgatcaccaagaacaaggactctgaggtattcgactgcattctggccaacgagccaggacattggacaataggaacagcaactatagatttcaaagacacaccgttactaaccaaagcagggagctgcagcacacaagatgtgacaaaaatgagaaacaaggccatggccaagggtggtgaccctgcggaaatgtgtttcagcgcagaaatcgtgctgtgttcagagcggcggaccatagaaaaaatgttcaaagcaaaaatagaagacggacacataacaaacaacgccagaaaggcgcacagaccaaaggccgggttgttccacttcaagttgccagacgtgttgcccaagcacttccaggcatgcttctccactgagccgtacaatgcctaccagaaagccttggagatggaatggaaacacagcgcgctcacaaacataacctcagaaattgccaacagactactggaggctgcaatgacggtggcatctgcccattgcttggggcaagaaatcaaatcggcacatagggagcatgccgtaaaggtggagtcagattccgcctcccaaacaagctcctttttactcccggcagacggaaagtggatggacggcgatctcattagacttacaaactcatctatcgatgaatttttcaacgtgagggttgtaacagacatggatagacgatcgaaggctataatcccaaagccaaacgtgaccggcctgttcaaatgtaggtacacaaagggtgggtacgtatccgcgttgcaaaccatagcaggcttgctgcccttgtacgccaggagtgtcagcgagggccagaactcatcagcgataccacataaatgtgtaattggcgtgccagggtctgggaagagcaccagaatcttgagcctagccacgagaaacgacctcataataactgccacaaacggcaacaagagaaacatgcgcgataagatgaaggccaaagaccagaagacagacataatggggccattggagttattacaggcggcaacagccaagaaccataaaaattacgaaaagatatacattgatgagtgcacgatggttacctatttggaatatcttgcagccacttccctactcaacaatcacagccaaaccccgtttgctgagaggattgagttgtatggagacgacagccaaatcggcgccacttgcataaccgccagggcccaggtgggcacaccaaccggcttacacaggtttgcgacagaggacaacactgaacattggctggaaagctacaggctaaagaccaatgccgcggaggtggccagcaaagtgactggaaaggcaatagtgtcgaaagtgggaggaaacctcaagataacgaccatgaacgtgaacgatcctattgccgcatatcagagcgcagttaaacaattcaacgggaaggacttcgtcaccctctgcttcaacagggacacacaaatagccatacagaagcgtgactcatccgtcaaggtggacaggatacacggcttccagggacaagaggccaagaaagtcttagtgctacaggagaaaccgacagcaaaaggcagcgtgagcacagacccgagatacacctatagcgcattcacgcgagcgcaagaccacataatatgggtcagcatgggattcaacagtgaagagtctattgaatcaagaataggaatgaggcacaaagtagagagccatgttggccaagctttcaaggacaaagtgaaacatttcatgagcatcctcagacgcaaaccagaagtaaaaattagagacgacgtgctggaccactacttcaaccatgttgtcgcaccaaagtgggagttgaaacacatatcggaagaagtggcccaatcaataagggcccatgcgagccagaaattcggcgcgtcagtcacattcgacgtgcacggaaactcagacgtgatggctttctcccgaggggtggtaacagccgtagtcctgcactgggacggtaaagacctggtggtaaaacaagacacttttaaggccatcaacaacaccagactgcagcaaatccacgaagcattgaagggcgcagaggccccacgtacacaagtacaatgggagacagtgatgcagataacgcgcaagcaaaggaggtgcatggacattgtaatggagtgtgttaagcaaacggaaaacataggcttgctcactagcatcaagtcagaaacaggaatattgaccgttgaaagcgccaacacaattgattgcgcagctctcaaactcgttgggtccaacggggtgcactacttaagcaacccagatgagaatgacacaatagtgtccagctcgacagaggaaaacacagctgaattgttgtctgccatggaaaggtgggtgtacgagttgtgtggtagccatgacgtgaaggccgtgcacagagtgctggcagtcacaggagcaatttcgaagatcaaatccatggcagcttcggcaatcaatgcgaccaacctgatgactgttgacttagatgccaagctaaagcaggagacagctgcggcattcgagtcagaaaaccgcgccaacctgtacgcgtatcagaagatggacacaatagaaggcagccagttttctaagatgcatccagcaagattaaggaagacagaacaatacgggtggatcacaagaggaaggtggatcccaatcagcgaatggaagacggcttctgctatagcgtcgatcacttatgttgatgagcttatgtcgggatggatgcccaagctagtggagatcatcacagcagccgaaactttggttgccggagccgtcggggtgtccatcaaggggtggtcccagcacatggaagacgacagtgcaacagggcaatatctagctaacaaagttgcccagctgagggccaaaatgctcaagaacgagccaaaaccaataacttggacaccaggagcacggttagcatggaatgacctaatcgccatcagcatgccagcctgtggcatgcattacacttctgcgcccaacctagtagacccaaattgggctgcggcagagcaagtagcgctgcgcatggtccccagtcacaaacggatcacacacgtcacggtcaatccgaacgccactctactaagcggtagatacagcgacgccacagccagaccgttgggtaacgcgtctggtcatttatacgatatgagtttggagcccatggaaactctgcttaaccgactaaccaaagccaacgtcgaaaaagtcaacataccagaggccaaagccaacctagagaatgtcatagagaacgccaaacggcaactcgccggagaaggagacatctggtgtggacaatacgacaccaaggtgcaacacagcacgacgcttgtgtccgcatcagcgctaagccagagcggaatggccgagcaaggtgcggaactcttacactatctgaacagtagtaaagaactgctcgttatcacaccaaatcttgacccccatagccgcaggacagtgacagaagttatggacactgatctggaaatgagcatgatgaccaacaccatgtacggggtcacattcaatgcttgcagagcactgagaaccggatttgcaaccgggcgcacccagatgaatggagtggatctctccgtagactgcttcgccaaaaactcggcgatttctatctggaaaatccaaaaagagaaacgcgtgacaaagtactctccactaccagagtatgccaaaacaggcatgcagactgtggaactaccagatataacccctgacttaatgaccagtgtactaacgaagaaagctgtgactaagagaaaacttacaatagacaataggatatacagaagtttgaacttaagagccctgcgtgaaggcaccagcttcgaagaccttctaatggcggctaggacaatgctgcacggcgtcatatactcaccaggaggcaccgcttggaagcaccaatcggactctagcattctaatggacacagcacttgtggtgtttgtcaggtgtagaaaattgctcaacaatgcaataggggcggcacgtatgctggctgacacactaaccgaaaacccgttgcgaaacaccatgggatacgcaaaagacttagccagagggctggctgctcaggcgcagacagtgttaggactgaactacaccgatgagatgtgggaaaaggccttggccagcagcgacaacaaagttctacacactatggcagacatgctacacacatggaacttcaaagtaaacgactatcacagagaaatacttcatggggaagcagtagaaatggaaatgccatttgaccaacccgtgccagccataaccaggtttgccttagcaaacctgctgcactggagatcactaggaggggaagcggaccaccagccgagagtgaggcggtacaccccgcctgccggcagaaaacaacaactgccagtgaaacaacaattgcgtgacgccttgactaaacaatccgcttggtggatggtcgagcctgaaatcagcgatcagtgtgacaggttacagctggaatacgactcgaacccaagtgttaacataggaatatggggcaataaggcgaaaatgaataaagtaatcgatgcattggcaaaccgcaacctgaaaatgtgcaaattgctactcacggacgacaaaacgaatttggtcgataaagcgggcactcaaaaagttatggccaaactcgcctctctaaacacaacgttaaacagcagaaaggtgcccgcacactttaaccaaacagcaactaaggccgtagcagtggcaaaggccaacccagggtggcctgggttcacttccaagttctgtaacagcatcctagaagaactagaagatctagacaatgcaaactggcaagagttagcttcattgttggaggcgggctttgcagtgggcgggctgaaattcacaaaagtcagaaccgcatcaataaacctcaacacctccaacatcgtgatatttgcaattggatctagaggcgacataaggccagcgcacaacttggcgaagcaactgtcactagacggagcatctgtcagcttcgtgtgcccaagcaactcttgcgagcaaacagggtccataaactacgtcactggccaatatgatgttaataaagagttggacaaatggcataagatcacgaattttggccctgaaacgttgagtactatcttcaaagacgagctagacaacaactggatcaggggactagactacgattccctcccgaccacaattgacctggtcataggcagcccagtcagcccgcagggtttgatgtatgccagcagccaaaacatagactatgttgacttctgcccaatgccactatccaacgaagccaccaacacgctgcagagagtgtaccagaggctgctgagccgtgagtacgttctgctgcaccttaaggccatcactctcgatttcaagaagctctctaacatgcactttgatgtggacaaactgctaacgtacccgcgaccttatttgcaagccaccgaggccaaactagcaccggcagagaaaggagaagtaccggtttgcaactttggctcatggggcagtaaatcaatcggggaaacgtgggactccatagccgacgagatgccgctaggggtgacgaaaatagtcacaatgggatccatgcgtgatccaaagactgcagagttcatgctagaccacttggatggtgccgaaaccgtggtgttagcgcaacaagggtccccactgtacgaaggggccctcaggaaggggatcactgtgctaactggcaattacaatttagctgagatacccacctcaaccacagtttggcaccacggcggagcagggacaacccaggaacttgctgccgccggtgtgtggcaggtcatcacaccggtaagctttgaccaaaaatattgggccaataggataacagaagccggtgttggtggcatgttcacacaagacgtgggtgatgtcagcttactcgatgtaaggccttgtgaaccggttttgcccagtggaatggacgtgagggcgcagggcctgtgcagtatgctcacgaaatgctacggtataggtgtaacctgggtgccaaaaggaaacgtctttgacatgaaggcggcgaacgtgctttggtggaaccagctaatcggggatgatttcgcttcggaacaaggcggagtgttcctgcacgcgattgaagacaagccacgtgtaacatttgacccccttattgaacaacgggagctgggagagagaatgacatgcggggcgcgagcgttcaactactactacgaccttgcagaaggcgacctacggttgagactcaagaacattggacttgcatgggcagacttagacaacaacggcatgaccaaggaccaatttacgcagctagctctgtgcatgggtgaaaacgttcaaatatatagtgatggcctgcaaactacaatcatctcacaaccgaccaaagcaattagggcgtattggtggcaaagcagggggcatgtagtggctgtcgaaaccaacagcaccctcggagaccaacaaaggcacaacgtgaccatggcaagcacaccaagactgaacacaaccaaatgtacacaggagccactggccgtttcttggcctactgagattaacggccaaatgcacccagacatgcacgccaggcaagcggacttcgaagaagcaatcaggtccgcgctaagcggagagcccatgaacacgaacaacccagcactaaggtcgtggtgtggacatctaaacagaatcacgacggaccgagttaaatctaactttgccattagccgcagagctgaccacagctggatagggagatgcaccatatcaactggccccggaaacgccaagctcctaaccagattgagaatcggagaactggtggctctgcaaatggtggacggcacagcaacgctgggaatagtggtgtttatagatgaagacgggtggtcacacttagtgacaacaattaatcctaaaaacgcaactggactgtacattacgtgcagcacactgttcatcagcaggggcaaacacacgggaacagttactggcactaaggcctggaacaatcaaaccaacgctgtgctaggtactgacctaccaattgttgataacaacgaagaaagggatcttagagccaccaaggtgctagttgggcactatgatggcataccacaccactggagcaaaagcccggccgctatctaccatgcggaagacctactttttggtgagggtatgctgcccgatgcagagatggtgcaacatctaaccaaatacgctggcatacttaggggtgcggtattcggagaccagaaattgtggacagtgccaatcattgacaaggataatttggcccgccactacattgatcaatatgaagccacaacgagatttggattcagcttcgagaatgagccagatttggaaatgctccgaagcctgagcaatggtctcgttgtagacagcggtatgcacaacctagaagaccacgtggggtacttcaaactgacattaaccacaaaagacttcgcatcaaaaacagcgacacaactaacagagatgttcgggccatctgacgcggcaaacccattccttgaaggtgttaactacttagccacaccagcgccgcacggtgtatactattacaaaggtttgaattggtcggtggctgcagacactgtgaggaagcccatcaacttagacgatctggtaaacggagccgaaaactattacttggtgtacactggaaatgacgcggacgaagtcaggagagcatctgatagtgccaccgcaatatacggcaaaggcaacgggttgcctcagattctaccatcagtagcaaacgtcaaggtggcagcaaacaagagagatgatctggtggtgctgtatagcgacgatctggatgtgctgctagccgcggacaaagataggtcattctgcccggcggacgcagtgcacgggaaagatgtccacctcggaccacctgtaaagggctcacccagcggttggggcttcgatggcagtggacccaacaaattgggattgagcacggattggcgcgtgtcgacaaaagaccataggtgcttccaagtaacactggagcagggatcgatgtacgactttgaccaacttgcccaagcccacggctgggaggacaacgctgcccagaatgaattgttggccaagtacaagactgcaagttacgtgctgatggacctagagttcaacggggaggagttcaccatgacttcgtttgggttcagatcctggagaggatcgtttaggccggccgagtttgtggtcaccagctctaacaattctaaagaaggagggctgtttgacccgagctaccctattggatcaataaagtacagagaaaatgaacggaatgaattcaggaacggaaattcaacaaaaatgcaccacttgaacttaccagatgattggagcaccaaaccggcaacatccgcagcgaatgacctactaaattccctagccaatgcattgtgtaaaataattgagcacaacgggaacaagcgagtgataattacggctaacgcagactggagcccagaaaaaaggtcgatgaacgccacatacatcaacctaacctatgatagccgaccccaacaaggctgggtcaatgtgttggcacctgacgttaatggttacacaactagtttgaggcaattgaggacaatcttatggtacagcccgctgcccgatagagactggttggtaacggtggtcggcggcagagatgactttaatgaagttgccaaagggtcaagagccgatttgccggagacgcgaggagtgttcaaacacatcaaaactgtcggaggtgcacaattgtacttgaataactgcacagggcacgctgcagctggtgcacacttgtgggatcgatgggttagcgacatgcagcataccagccatatatatggcaccgatgaatggttcatggcacagtacacatgcaaccacatgaggaccgtgatgacactcgaccagttcaactatgagccaatggcgtcttaccccagggtgcatcccatcgacatgctaccacactggttcaagaaagaagacaaagagagagtcatgcaaatgcagagcaacctctctttgactaacagtgaggatgacaaggcaatagcgaccaggatatgcaaaataagtaagccgcatcaccccagtgcaacaccattctccagattccaagtgccagccatgcaatacgccacctccatagacgggagtgtcgtaattggaggagcaacctaccagatccatgagaatggactcctaggctccgtatccaatgcgtggactaccatactaaacccaaagaccactgagcaaattaacataacacaagggctgccagagggctgtttagtcatcacaccagatgttaccactaagcccacatgggatggacccatagtaagcataaatgccagccacccctgcgcggaccaagtggtgtccctaccagtacatagcagaggtgagttgctatccgtcgcctattacttgctgctcgcggggaaaggcaagagggggatgttgctgactgatcaaactgcccactttgtagggaccgcagcaagggctagcacgcagccaggccagatcaaattgtatggagttggcaacgcgaatggcacacaagctatcggagtaataatcaccagtgatgacatcaacgtcgcacagcgaagccccagtagggagctagcctccataagctgctggaattacatgggagacagagccttcggtgacaaggtgaccgtggcgcaaaacttaccaaccaacaccccgaggtgggacgtcaggaaatacaaatccagccagaacataaccatggattgcgaaaaagagatgcaaaggtcgctcccagccgagtttaaacaaagcaagctaataaaaatacaagttacaggcagccttttacaagcagtcagaggccaagtggttagcacaagccagttggtggccgaggctactgcgatcatggcagctttgggtgacggacccatggcagaggatgctgctgaagaaatagagctgttaagaagtcttggggcacaaacatggcagattgacgcgaacgccggaaagaacccatcatggtgcagcaactgtgccattttaagagtctcaaaagacagaaacaacaccgacagcgtgtacttgaagtacagaggcgcaaccgtgaaaccggttcgggccggcatgatgctgtcctcccaggaccctgaagtaaatgacaacgtgccagaaggcgtgtggatggacccaacggagagatcatacgatggcgtccccaggtacacccagggaggcatgttgaaccaaggaggagcaacacacggcaaaggtcagtctagtaaagcgccaacggagaacctactgcttgcgtacgcagtggcaatgccggaagatgagtatgaaatcatgatgaaacatccaggtagtgcggggatggagaaatatctagtgcaccaccgggacataataacagagaaagagaaagaaacaataaagaaaatggacgatcccaggatggtaaatggcttactaagggtgatttccagaagggtggaacccggcaaaatactcgtcacatggggccaagccacggtggataaaagacaaatagcgtttgagcaaagcatagtcatttcaggacaccaaagtaccggaccaaaccagactacacgagacttaatactgtttgacaacgggcgttaccaaactataattgtttacgacgagtctgaggcggcagatagcatcaaaaccttgcgaaagagacaattggaaagaaatgacacgataaccacacataacatcaggcactcagcactggacgaaatggctttcaatcaaattcatgactacagaggtgaaattgacgcatctggcagctcagcagcaataaacaacttcgcatacatgccactcacagacccgatgtttggcaaaactgaagggtatgtcacgcatgaccatgcacctgagattccaactgatgacataatagccttttacgaaaataaggacctaacggacttggtaagagtacaagccccgctcaacaaaggagagggcaaaggctataagggtcataatttcccaatgggaataattgagtccaacaaaatagctttgaccccatatccgatttacagcagaccagtgctcacgcgaatggcgtacgcactagaaaatgccgttttcaatgtgttggcaagcgccatcacatatagaaaacacgaactcaatgctgcttatgaagccaagatgttcgtcaaaacgtatggcaatgaggaggcagaagagaacattgctagatggcaaaaaaacaaattgtacttcagcacagcgcaagtgagggagtggctgtccggaaggaccggaatagaagcaatcgaccaggaactgcaagacatattggagcaaggtatgttcaatgagccactgaacagggctaacgtacacgtcaaaatggaacaattgctgaagagtgacccggtgaccaacttcgcagcgcaacaggtgagaataatcgtctggaaaaagaaaggatacgctgctctattctcaggtgtgttcgatgaggcaaaggacagattgaaagagtttttgggcaagagatttgtctacgcagatggacttacccctgaacagctagggaacaggtgcagactggaaacgtgcgaggggttccttgaggatgacctaaccaaacaagacaggcaaacagacacggacacgtcggcatgcgaataccagatttacagaagcgttcttggggtacacgaggacgtggtgcagctgtgggagatgtgtagcgatcacgtgtactttaaaggagatggcataaaaggcaacttccacaagatcagagaaacaggatcaaagacaacagccataggcaacgtgatagtcaacttgctagtgcacaggcgattggtggacaggttgggtccaaaccttaagctaatgttagtgctgggtgatgacaaccttatactatccgacaagttcataaacgcccaagaactgagacgcgagataagaaattattggaacatggaatccaaggcagagtgggaccctctcagcggcgtattccttcgcatgttggcgtgccggaacatggacggacgcgtgcaaatggggccagactttgtacgactacaaaggaaattcgaattcactaacggcgtgtcagaaggatcagacgaagcggtgcaagcaagagtgctatcttacgcatgcatgctagggcccctgccgggggttatggacgcaataagcaactgcgacgctacagtcgaaccagtgccatggtatgaccctgtgccccagtttgaagcggttggggaaaaatattacccaaatgtgcctctggagcacaggaccgcagccgtgctagacaacatctctaggctcacaagcatgatgagggaaaggcacatagtggagtactcctggcaacacttcgccacagactctaaaactagggatattggctccctccccaccggggatcaaacagcaaaatga

SEQ ID NO: 1209 - DNA, 19080 bp, Ceratobasidium endornavirus D
  source 1..19080: mol_type = other DNA
atggttaaatacagacatgctggtgttaacatgtacctgaggatacgcagggccatgcacatgaggatcatgttgactgtaaccggccccggccaacttcatctgttggaggcttggcgcgacgaggaaccacccgagtttgagtcagcaatcatggaaccgcatggcgaggtgctatgcaccaacatacatgaactttacacaatcttgcatccagagttatgggcttcgtatgaaccttattgccatgacactgaaatggccctagtcaatgctgagcaattgtcagaggaatggcaagcagcagagcaacaaatcaactcattggaggtcaagaataagattcttggtgcaccgatcggggtcgtccgggagcgttggtccacacctcacgttggtgacgaaaggtcccagaatgttttgggaataagggctgtcatactcgatggaacttatgggccgtggggcccaaaagttggcgttagccagctgatgtctctgttgcaaaagaccggcctcgtgggacccagtgcatacacgccaggtacgaccgactggaacaatgcagttgagcatgacttggtagtgatacgtggggccctctcgaggttaatggtcgaaaccgtcaaggtttcccatgacatggaccaatccgctattgacagcctggaaagagacctcccaaatgtcacacttgccaaagtgcctggaatacccaatccccacagcgtactcgccacggtccggaaagtgttgcacaagttgattcaagagagttgcaaggagggcattattgatgtggggggcaaccccaggcacaataggcccatggactggaccatgcgacccacaactttgattgaagatgtggttcggaaaatcacatcccctaacgattcaaacacctgtgagcatatgcttagtgagtgcacctgccaccaagcttcaggcaaacctctcctttttactgatagtatatacgatatcccgccagcagaggtggttgcagcccttgacctgaggtccctgtccaccttctactataccatgaccacaaggcatttcaattttgacgacactgaacaacaggccatgggattcgaccaaggtgtacaagttgttagcggagagacactactcactttaacttcaggtgaatcctcaccttatgaaaacaactacggcaacaccaagttctggcacagtgttgacgtcttgtacaccggggtgagtgtctggcgtgttttcaccatgcacgctgctggttgccacattctgcgcgctggcattagggttgtgcaatctgtagatctctaccgtgaggtgaggctcttaagtgtgggcagtcccgctgagacaataatggtgccagtgatcaagcgccacaccctccttagctatgctgggaccgattacaacatagtgagggtgccgcttaaattgcaacctgatttattcaaccaattgtgtgatcggaacatcactggcacgcttgggttggacaaccttgtggagtatgggctgggtatagcccacagcaaatactcaatggctgacaagtccattggcaacatgcacatcagtgcagaggatgttaagttgcacgcttatttggcaatgatgtatatgcgccgcgtccacggcggcattgatgagctactcaatcaagtcaaccagggtagctttgaacaagtcagcaccaacttagtactgtttggtgctgccgccttacagggtatggctaagagggctagcccagaggtcaggcagttgctcaagaggtacgccaacttattggatgtcacaacgcttcggaccaaggggttggatggtgaaccggtgtgggaccagctctcgctgttcagggcaaaaggcaccacgagacatctgaacatctatgactgcgcttccacacaagatgcaggtgcagccttgcatggctgcgattgccacacacctggctgctggcatgttggggaagacagttgcaaccactgcggcagcccctccgatggagacatgtgcacttgttgtaagatggaacaccacacgcacaaatgctcacacaattgtatttacggccatgccactagtggaatgaccaggtgtaaatgttgtgacgttatagacgattgcaacccttgcaaaaattgtgagcgggagcctaacctctatgatactattgcggctgagatgctggcaccgttggtgaattatatggaaaaaggtgccgtggaaaaagttgtcaacggcgtcaataagcagggcatccctgtccgcaagccgggcggtgtcacgatcgacaatggtggcatggagcatacacatgtttgtgcgctttgtggcaatagctacatgcacaagcacaactggaattacctacaacatcctgagttcgttggggactgcccttggtgtgaaggtgggaaaaaagctaagaaggttggtgaggacaaacgtgtcggaccgatggtggccatcaaagagccagttcccaggagctgggccgaggtagtttccacccctcgccctggccagcaagtcacgccctcgacccctgccgtcaaggcaccaacaacggagccagcccaagcacagccagaggacaggggcgaggcagtcttttccggcccggatctgagcaccgtttctaaactgattgatcttgttgggccgtttgttagccagtgcatcactgagggctctgaagcggcatttgacgacctacaacgaacaccagcaccccagtacaccacgatactgtacgcgacaggtgcgggcatgataaccttcccttcagatagagttcgcgtacgtaatatgggcgtaatgcagaactatcaagacaagaagtgcgttatgcattccttgcgtgtggtttggcaaaaccccccaagcatcatggaaatggagtctacaacgaacaaggacggcatgctgtctgccgtggacgtcatgttgatagctcagaggtatcagcggcccatacttgtactgcatagagagcaggaggcattctgctaccacccgtacggccactcagggccgacgccaaccatcttcatacatgaaatcggcagtggaaactaccactgcgtacccgctgaaggagtccagctgggattgcatgcagggttcccctggcccaactgtgatttgagtcagggcgacctggccgacattattggtcagcaattgccctcatttgatgacctcactgtggacgaacggttggccatgtacgaccctgtgttgaattggtggaacaatgttagggccaacgccaatagcagctcaactgctataatgtttagggacggagtgatctcaaacgtcagtgtacagacaagcaaggtcaaagacactgggttcagcatagatgtgccaacagaaatggacaacgctgttagagcctgtttacgcggcgacgcaaagttcttcacggaggacgtgagtacccggtccactggggcattctccatcaaggagcgcctaagggcggagtggatgctaactctcgctgaattgtgcaatgcactgacaacccctcatgtcggcagtgtaggcacattcatcaagcctctggtgtcccatgataagagaggggggctcagctacttcactgtacctaatgaaatgaagataaagaagtttgacatggtccactttggtggtagggtgccacagccacgcatggtcattgccaccatgatgagcaaaggtggcggcactgtcgtgtacgttaagttgcttgacgaccacacaaagcgtgataccttcatccctaaagttaacagcggatctgccatcagacggttgatggcagtgagccgttgccaggtatcagacgactttgtgcagggcattgtaatgggtgcagaggccaggtacggtgtgcccggctctggcaagtccaccacaattgcatcagagtatgacgaggacacaactgtgactgccatgactagcggcgcactggatggactaaggtctaaaatatcagggaaaaatgtaatttcagttgagcggctttctcttgaaaaatgtcaaaccagcacattggtggttgatgaggcaagcggtctcagtgtgacagaccttgcattgctgctgacagacaaggtgaaaaaattagtactgtacggtgaccccgagcaagtgggaataattgacatgcattccgtcagcgggcacaggacccattacagtgtgatgtcgctggccaaaacaaagagcctcaacctcaccacctacagaatccctaaggctgtaggttacgagatgcgtgacattgtgcctaaactcaaatatggccacgaccgggatggggaggtggtgttggaatggcagcaaacggcggacatcagcatgttcctgacaagatgtgaatcaatgcatgttgagtgcatttacgtgttctattcacagcacttgtcggccgttacgcgcgcgattaaacagtccaactacaagggtaaagtgctcaaggtgcattccgctcagggcagtgaatttaaacgcgtggctgtctggcagatgggtgccacaacactggatgcaggcattcaccttaagaccagttactgttatagtgcggcgggccgcactagcgatttcttgtattggtgcagcgttggctgccattccgcaggttccagcctgagggacaggatcatgaacaccagcccacgtggtcaattccccatggcgtccggcacaggggtgctggacagtgtagcggaattgttgaacctggctaggagaccattctcacaaactatcaatgatttctcgtccacaggtgcagggcattccaagtggttcgtaacagtggccacacaaatccacgatgagataactcacacagctgcaacacgaaggaacaaggtcaccattgactatcaacaaggagggagaaatcgttacactgtcaaagtgtctgaccacctgggtagtgccactgctttaattagcagcaaaattttaatgttagaaaagacagggtcagggccggcggttgacattcttagtgaggtgctgcaatccgtggctgagcaaccattgtttaaaaaccttgcacttgtgcgtgacatgaacattgggccatgtggtgagagcttagtgtcattcatgtctgacgtgctaatcagcacgggtgccaatgtgcttgaggtatcacactcagatgtggacggaaaatccacggggatctgtcgcactcaagttggcacgtacaagttcacattcaccgatgataggttcgacctcgaagaagagccagaatacaacactgagtggccgactgacgaaggtcaaacagttgcaaacctattggtgtacattaggacacttgagactatggctgatgaattgagcagcgcacacgaacccacaggccagggcaccaccccgtatgaacgcacccttgatgagaggggtgcagttgaacggctcaagtctgaactcagtactatcaaccctgatgtagaccttgtagttgaaagaatagccaatacagaacgtgttcagtttgcagttaagattgacaagaacaggggctgggtgaaaggcaaagtgcttcgtgctatcctagaatgggacgctacgctaggcagaatgctagtaataaggtacaaggttgcttacatggccgtgggcaaatgcccttccgccgaggacttggaaaggataattaacaattccttaaccggcttcaggcttcagctgggtaccgagactattccgcaaataaccgtttcaccagaaactggcgttgcggcacaggacccccctcaagtgcccgttgccgaggaggaagagcatatccccgcatcctctggcggcaccggcgcaaccacaagggtgcatgctttgaacgcagacgacgacccagaagtggtggaccagattagccctaacttgatgccggggacggcccgttgggccatgcacataatcggaaaatgcttcgctgacatttcaaagaatccgcagcactacttgagcaagcttgcgataggatcgttcgcaccggtgggactggaggcggaagtgatcaggtcaatggatctgtttgccagggcgttagcacgtgtgtaccccttgcagcaaactgttaccaaccccttgacgaatgagcaggtaacatggaccgcaataatagaggacctcgacacgcttggagtgccgtatgtcaggggtgtggccagcgtttcgggcaggccacctctaactgggggtaggattggcgcgcccttgtctgctaatggcaagaactgccagtgcaaccaccagcacgacaaaaaacgttgctacgtcagcagcacgacgatccgcatcattaggacattagccgtgttgtcacatgtagtgcggggcagtcttttcaccctcaaggttggtggtgttacatataaaggcaccgccgttaaaggatgtactgcatgtgccgggttgttactcactgacactaatgaggtacccctgctgaagattggtgcgcagtatgagaacttttggtacagggacgtttacatcgcgcccacagcagccggttgcctagcagctgcacacttcggtttcgtcatcaccacgaagcacattgatcaaggcacaccgttcgcaactatgaaggagccaaaaatgttaaaggaggccagagcattatgtgaaagcatatttgtcgttgaagcttcacatactttgggcaatcgggaagaagagtcatgggtagttgcagagcgcgtgtataacttctcctggggttgctttgagtatctgattggaaaaaaccaaaccaagggggccagcaccacagcgatgattatgggcggcatggttgacgattcattaggtatactcgatgaactcaccgctatttgcaggaagctagattggaatatgaccagccgccacctggccacacatatggagtgtgactacaccatacaggatgctaagaatcagaatggagatgacgttttctatttcgccaagaactgggatgtaattatcaacggcggctcaccccaattggcagcgtactgctcagccatgtcagatgctggggtggttgtgtattacaatcttgatgggagcacaattaccgtgcattacttgccgagtctcaacatattggtgcaggcagcacacactgcagagttggcaaggtgtaaaggtcacttgccgttggtagctaaggcttacgaggccctcaaaagctttggtgccaaccacgacaccatacatggccttaagctcagtatggatatacataggtcagagaccaccaaggtatggcaatatgtcagggataaagcgtcacaggtggaaaacatgagacatggtggactcgctacaacgcagtacgtgcctcaattgttgatgaacgccgttgatgcccacgaccccactctgtcagctgcattaaggcttgcaggacacaacaagcctttgctttctaatggtgtcgacgctggcattgagcagctccacgatacttacgtccattacaccgtgggccagtccagggtaaccagtgtgactgcgcacccaggcaacctagggctggcaggtcgctggacttggaactgccaaccaccaacagaaattaacaagaaagattggtacttcacacagttgccgatggtgagatccatgataactgacatgatcaaagtgctaggcaataaagggttagagactgacagggggaaaatgttgaatgctctacttcagcacaatttaaagccaatgtttaactctacgtataggaacacggcacaaatcgttaatttggggttgcagcttgctggattaccactgacagaacttagcacctatgcgactggcgagagcacagtcatatttgggctgatcccaaaacagtacatcccttcagatgttgccaactggaatgatgatctcactgtcatcagctatcttgggtcgcaagtggactacgcaatcaggtcagagtggatacagtggctgagagtgggcggagtttacagctgtgcgggctacacatgccacgtggccatcaagggggaactgtttttccattcattggtgcgtgtagtacttaccaaggccgcttgcaccttacctcggtatcatagcaatagttatgaccaggtcaaatccaactttgtgacctacagagtaccaatactcaacatcacagcattcagggctggcgaaaggggcattttcaccagcgaagtggtgcctgtgccaaagaagattaataggttgcttacactcagggcctctaggcctggtacctcatggggcgacatgttgcagtatttgagaacgttgcggtacaccagctattacagcgcgacgggtgtcttcaagagggataagtcttggataaagcaggccataatgtgggcattggcggtgtatattcacgatgcgccgttcttgcaactcattaaagacgcagccaatcttgcacccaccacagggttgagcggcaacaccactattaatgtgttagtcgaccgtgctggggacttcgctaaaggcctgttggcggacgccatcaagagtctcaacctggacctgtccatcacagaagttgccaccattgcagctaagtatgcggacttgctgacaaaccggggtgcccaagccaatgaactgcttggttacatgctggacagtagtgtcagcagaacagaaaaccaagtcactttcacgagacaccataatggtgctatgagggagatcagtacacgtacacttgaccccataacccatgctgaagatgtcatggcactacacaacaccccacagaacgtcgggggcggtggtttggcaattggcaggaccgtgaccatcgaccatgattacaggactcctagtggtgggctggcagtttgcttccccagcggcactgccaatgatagaatggcagtgatggaagtggcaaatgccttagcaccctatgttacactgagggtgcaagccacattaaccgaccgcgacctagttaaggacgcaacggctggaagcaacttagagactgcggctaacgcatgggcacgcaacatcgcaagtgtgagccgccacctgaaggaacacgagggtgagaagcacgggcttgttatttgtagtgcatttgacgtgccgtcgatgtacaagtgttatctctccggtggaatactaattagggttagcggcatggcaatgacgccaaccaacatgataggcgtgctggggaaacccggcgtgggggctaactcagttggttatccattgaacactctcatgtgccggtcatggttcagagcagacgatcagggggtgatcggcaaattccttgaatgggtgaaccaacaggtcttgtatgagatattgcctgaatggtgctgcagcagacatggaaaaccttactatggctggcatagtgacacaactatgaaaaagggtggttgcaaaactgaggtgttcctgtacttgaaaggcagcgcacaaataactgagtcggtgttgagccgcatgggcttaacctactccctctacgacccaaccatgtcagacgcacatagtgtacagcacgcacttgactttagtaaccctggcgctgtcaatttgatgatacatgcaggtggtgttggcacatgtcagagttgcattgacgctgacattcccttcgtgatagtgccggagtttggtgaccaattggaccacagccaatggttccattgggctacgctgcaaaaactggaggagcttgggatcaataaatatgcagagatgcatagacacgaattaatcaagaagacctcagcgagcaggccagaaaaagttatgggtcaactcgtggccaaaaccatgcaaacgctttccgaaacataccctgaaaactacccgccttacaacgacggcagcaacgacgtcaaagacgagttgaccacactgtgggatatggcgtgccaggatgagcccaacgctgccggccatgttaagagggtgggctcgttgatgtcatcagaatataaggaaacaatcgaggcaaaactgatgcgcacccaggatgaagtctttagagcaagggcgagaattggggcccaggtcgtgctgattttgatcaatgatagatccacaccgaaacagtacgctgatgggcaattggtggtgaggatcaacccaacaatgaaagacgcgaccagccatatcagcattcactgtgaacgaagtgaagaagaatggttcaggctgtcactaacactcatgaacttcggagccaccaccatggcgttgggccaacaaccaaatgcggcaatagcacgttggagaaataataaccaacctgggctagttggcatcatccccaaatctgcagtggactctagctggatcactttcatcaaaagtggggccattcacccacgacgagggaagtatgctgctagccccatcgacttgccccacttggtgaaagttatgtgcatgatcagatcagtgcattccagtgagttgggttgtagctacttcctggcaacctcagaagccctttatatcgatgaagccagagccaactgggttacattgttacctaacgttccttcctatcagttgtcggatggtgaagtggttatgggtggattattccatccggaaggcacgttttggacgcatcggtcaggccaaaaagacgacgggcaaccagatgatgacgacgacccagacaccggaaacagtgatgatggtgatagtgacagcgaggatgatacagagtaccatgatgcacaaactgaccaagcgggcagaatacaggcattagctgccagatactcctcagctgaacagcaaccgtctgatgatgagagggtttctgggactgaaggtcctgcacgtttcgatcaaagggctggggcactggcagtcccaccgccgcctaagtccaatttaaccggcctaactgagatagaggccatcatgagtgaagtagagcaaaggcgggaggcccgccattcagggggctcatctagcctcaggacgtgtgcggaaatgagaatcggcaggcttgtgacggaccctttggacttcttttatggtgcagccaagctggtggctgcctcagcggcgcgcctccctggcgaaccaccatcaatcgcgttggtgcctgaaatagggccaaacggcagcctatcattggaaggcctcttcaccttaaccttgcgggaggtcaccagtgccatagaagggcgggacacgatgactatcgcgacattcgcgtcactagtgagcaccatgccagaccttgaagggaggttgcagctgctgggcactgcagaagataaagcgcagatacgagttggcctcactgtgatggcactacttagggcactgtctttaagccaagcagcaagctatgtgtcggcagtcacctggaggtccgtaatcaacgacgtaattaactccgtagcggaaaaaggtatgattgaagcgttcaacgtcgtgtgcactgacccttatgacccagtgcgtgcagaaatgtaccatggtaccaattggctactggaccccacgaaggcagctgaggccatccttgatgagtaccttagccaaggcaaatacatccaccctgggaatattagagccattcgtgtcagcccggaattggctatgtgttttatgttggctgtgcagacgatgcaggcggttgtagctagcactgagcctggcaacgacaccgtggaccccgccgtacaactgattcaatccatttcctctggtgaccacgatgacaacatatcagagttcatcgggcaaactaatgacaccgcggttgatgagctggtagacagcttccacataaataacaattgggtggcttcaaagatccgatcagccatgtacggtttccagcggtcagtgcggattgggaaaaaattccaccccctgcgcgaccatgatggggtggaagccattaaggcattaatcatctcactcgttcaggtgcgtgacggggcccttgcctgctgggcgtggtgcaaccccacagtgcgcaccaagttgcaaagcagtcacaaaatagcggccctaattattgccaagctcggcaggccattcatgtcattgggtagcaatcacccagaaggcacaacattgttgcaggcaacatcacaagacatgtcaagaatcactaacgcatgcagtgatgctagcgcaattgggcatgcacgcggcatggcgttaatgaacagagtagtgcggttaaggatgcatgtggacggggaagtattattcgaggtgaacgacgatgacctggccacgcaagagcatgcagatgcaaacaacatgcgcgggacctttttgttgacacacggcacgtacgacgggttcgttgacggtcgtgacgggtcaagaacggcaagactgaccgtggctaccttccctgaggctagctgccggggcagggtggttgatccagtgttgagtcctaagaatcagggtggaacggtgatgataagcaggtttggcggctgtgactggcaacctgcgtcatggtcgtggccttgtcacattgccattgcagcattacagagaatttcattacagcgaccacacacactgccagttagtgacattggtgaggaagagaacgacggcgagcaacgacccacaacggaaggcagtgcgatgaagaacaacaaaatggtctcgtggagggacggcgtgacagctgctttgcctgtgtcaacgccaccaaccccacgtagcaatttggagatgttgcagctggagttggacttcacggatgaaggcacactcagtgctactgattcaaataacacaactgagttgttggtcttggcatcacacagtatgcataacaaccgactgctcaatgtgatgttgagggagcacaacgaattggacgcactgggggtcaacaccacattggggaatctttatctcatagcttggtctgagctgcatgcgaccatgaccgcacaggagattgcaggtgaggagcgtcaacttgtcgacgccctaatggccatggccagagtgttagatggcgccggtaatgacctgatggcagccgtggaagcatatgagaacaacaggcttacggcactagtactaagggcaggtgaaactgtgtcatttgcgccagcaatcatagatatttgttgctccggcttatggtcaagcaaagctgtcaccaggttggagctgttgcaatcgctaactggtaacagtgatgaacagtcagagtcagacgaacaaatgccacccagtgacgacatcaatgccactcacaccagtgcaacctcagaagatggagaagcattcgcgcctcaagcccttccagatggatgggccacattgccttggcatgttagccacttcatcaactgcctactagcagtaacgccttcaaacaagctggcattgccactgttgataccttgcgtggaccatcagacgatccagctagtgcaaaactgtgaccacccccttagtggcaatagctgcttcatccatcttttgaatagtatatctgaagagacgttgccaattgtggccaacattgtgcgtcagatggagagtgacgggcagtacaacccccttgagatgctagagctgaagacgttagtgggtgatgagtttgggcttgctgggtcagaccccgtgagccctagggatggagaccttggtgagagaggcaatcgaccgcttgacagggtaagacggttaaggtctacattaaaactggttgcattgagagcactggagtcatccgggtccagtgggctagcctccggtggccgggtcccaagtcgagtggaaaggctggcagatgcaccagaccccgttagcacgacggtggcccgcaataaacgggtaaaagtcgacttggaaagtttcaagggaaaagccactgcactgactgccgtagttgatgcggtaaacagtcaaggaaaagtcaagtattttagctacggggacttgtggggaatacccgactgtcaatggctgagaacgttgattgatgaagctaacaaaaattacacgcctttttcacactggaatagcaccggcaacgtgaggattgggtggcccaacggggcgattcaactcattgacagcttagagaatgtgccatcaggcgcttgggtgtgcgatggggattcaacaccaaaagaagcattagtggaaatgtaccatgcgtacgtccagcgtcagaccggcacacccattgcgaaaaaccccaggcgacttaagaagaaagcagacagggtggctgcagggaagcataagttagccacagctgcaagaaaagtggcacaacaatatgagaacacaactgccatgctattaaaagaggtggacgacggcaccataagtgagagcgtttacccattggcttaccaccatcccaaatacgtgcagtacgagaacaatgcggaattcgaggccgctgaactgcggcgagccaacaattggataaagaggtgccgcaattcccgcgggggaaaatacgacttgtcttgggtggtggacctggcagaaatgataccacctgattggcgacaagcgttcgtcgacgagtttaaggggggagtgcccactgtgactgaaaaagcaactgcggttatggtgcaaagcattgggccacagccaccccatcttgacgccgtattaacaatgttctacgattgtgttgttgcttgtagtgaaatggccatgccattgaacaaattgaacaggttggtcagccgttgctggccacgtgccgaaccacttgatttcagtgagtatgacccgagcccatttgtcgacgtggatcacagacatgaagatgctgttgcgttcctgatgctgtttaacaacaaaaatcataaccaaccagcggcccacctagtgagtggtagcaatgaatcagtcgcaccaccatcagaattaggggagcctgaagagttaacagtcatgagtgaagagctgggggaggtaacagtagccaacaccactgataacagagggaattacaccagggcccaaaggctgggaaacgtgagcgcctatgacctcatgtgggaagcgttggagccattaaacggtgttgaaacccccgtggagtacctggaatgggggttgttcgacaaggactccatgcttatatatgccaacgccaaccctcccggcgtgaagtattccatgtacggcagtttcaatgctgacttgttgaaaatgcgtaaagggctactacgtgcaagatcggcggcagtgccaccttacacaaactcagacaatgccagcatatggagttacatggtggcaaaactgcaaggggacaagaccaagatccggccaaaaccagcaacgatggtcaaattcgaggtgacagaggaagaggaagagggcaacgcattggagttgggtgacaatagtggtgaagagcagttctggacgtcataccgggtcacctacgacccccctttctcagatgagtgttgttctttgtgcttcaaccacctcggcctacatctggacagaaaaccacgacacactttgggggacatagtaatcggggcatacaacaacaaaagaaacattggtgtcatcaatggtgagggagtttgcacgctcaccacatttgtcacaggctggaagaccatctatttactactacaacttggccattgcagtgtggccgaaatcgctgggaacagggtcaacgcagaaccagtgtttcacaagagacctagtgcactgccgatagcttattgcggtaatggtgggggcgtggcgtattatgccagcttcattaagcagggggtgtgcaccgagcacacgcataccccttaccaaccattgctcaattatctgttgaacaggactgacacacctgcgatagtgatggagggcctcaatcttaatgccagcaaggcgaaggccatcagggcctcgtcgaagggcaaaaacctgtgggcagtgcgtaacagagtcaacaagccattggtgcacctagaaatcaaacctacagatgatggctacataaccatggaaaaattgttgccgtataggctttatttcattatggatggggaactcagacctgggttcagcttgcccgtgggcgcaactggttactgcaacatttacaccggcgtggcaggtaacaaaccatgcagcctgatcattgacggcggcaccgggttcgttgacacccaaaggccggtcagccaagtggtgggcgagcctgtggatagagctctgacgcatgcatgcagggcgcattaccagccagaccatggagcactagccttggcgcctgggcccaccaggaagctatacgtttgggactacgataacaggggccaccacatgttcgatctcaggggctacttgtacaccatgcctgccgaaaatgtgataataccacctggagtgagcaggcagtggatggaacgcatgcgcggcgaccaattagccataaggctgtcaataaaggctggggcagaaacagtttgcttcgagtgcaattcactggacagaaaaaccacagttaaagcgttacggggaatgacgaacaccgcttggtctactaggggagatgaatatagcaccaagtcactggatgataggcaatgcaccaatcttgtaatgtggctattacacagattcccaaaatcgaaagagggtaaacttatcaggaggctggccgacggccaaacgtatagttacacaaaaatacgggaagtgataggcaatgacgcagtgacggaattgggcctaagccagggccagtatgtgtgccaccacgagaaatccatcatgaactttggttcaactaagggtgggccgacgctggtggaaggttacacgttttcacaatctggggagaggttgcctgacatcgatgtgatggcttcagcaccacaagacaacaagtcggccgaccatgccgaaggagccacatttttctccgagcacaagcaaaccaggatgcaggacccgtgggcagtcagcgtcgtcagggagaggccagcaggcatcatatatctggcgtccggtggaggcaaaacgtggttgaaaacgcacaacccggatttgttcgccgatagtgatgatctggtaaaagtgccagccatcacaaactgggaatcttggacccaaggacattggacagccagaaatgaggaagtgagagcgcaaatgttcgagaacagggggctgtgcgtagggaagcttctactggtctggcaccccgattgtgtgccgagtcaatggcggggggtgaagagcttgtacataataatcaatgacgacaaaggggaaaggctgttcaacataggcaaccaatcattgaaaacaatcatagaacggagaccacgactaccgcacgccatacataccagggagcataatgaaagggtgatacacgaatatttcgacgtggccaacaggaggctacagccaatacgcgccctagccatggctcatatgcaggatgtggactattatgattttgagagtgggttcatcaaccctggggcaaaaccctttataccgttcataccagccacacctcaaaacactaacttgctagatgctgtggacccgcaaatagatgaagtgacagtggaggcaattaacatgtttgagattggtgacctgtctgactgggttgagcgcattgcgcccagggacgatttagtaataaaatcaagagaaaagccagggcagttgggcaccacgtccaaaactgtgatgacaaggtaccctgtgtggtccaggcccgtgtttaccaaggtggtgcactcagtgttcaacgccgtgagcacgaggcacggaacggtcgagcacctgattaagcacaaattggaccccaaggcagagttgaagagatttgcagaagcgtggttcaagccgggctgggaagaatcgtcaaagaagatgaaatccacacccgtgggttatgaccctcaagccaccaagcgatggataaatgagcgccctgacggggtcaaagtaaccgatgatctcatggagatactggatgagggaataactcacaaccccataaacgcatggaaggtgcacgccaaattggaatcgttattgaaggaagacccaataaacgccccacagcaacaaaaagttcgcattatcgtttggcagcggtatggttacgcagccatattcagcccaatttttattgaaattaagaaaaggttcaaaagcatgctagccgaccatgtcctttacacggatgggtacacacctgctgacctctctgcaaggttgagaacggtcacaggcggcaacaggttctttgaaagtgatgccagcaagcaggaccggcaggtcactcatgagttgtcagaaattgagtacctgatatacgacttgctcggcatgtcaactgaagcactgcaactctggaaacacggctcggtcaaatggcggtttgatggggtcaacatgtctggccacctggacgcccgtatgatgacaggcagcagcgccactgcgatcaaaaacgtaataaccaaccttatcatccacgctgacatgatgataaagaaccgagagcatatcaagatagtcttggtgctgggcgacgacaatttgatggtggtggatacagtgttggacttaaggggttacaagaagaaggcggcagagtactacaacatgcacatgacgccacactccagtgagcattacggcacgttttgccagatgatagcttacttcacaccagaagggactgcggaaatagggcctgactacatgcgcctgacacggcggtacgaagtcacgaatggggtgtctgaagccagccctgaaaacctgacagctagggcaatgtcttacgcaatgtggttgggtgatatccctgaagtgcaacagctggttgaagaaaaaggttggccgataaagccaatggcttggtacagcccctcactatgcctcagggcagtagctagcaagcatgacatgagtgaagggcacgtgttggcaaggttggcagctttaattgaaagcatgcggaacccgaggccaaccacgtggagttggcagcattggacaacactgaaatag

SEQ ID NO: 1210 - DNA, 7321 bp, Ceratobasidium endornavirus F
  source 1..7321: mol_type = other DNA
gcgagggaggctgaaggacgcgccagagggtaaaactgggaaagattttatggacgtgatgaagcaagtcaggtttgaattttacactagtgagccgcttctgggtggacggcgatgctatgtcttgccatctgtgaaattgctcatgaaacaaattaacaaattacgatcattgaccagatcagattatattgtgtatctgaatgaatcaattaattcaatcgcagcattagaaaggcatttgaaatggtacatgccatattgtgaattagatgtctttgacatgaaagggtcagaaacactagacctaatcattaatttaataacaaaaatcaacagatgggtcaaagaacaaatggttaaacttaagacattagctgttttgacgtggcaaaataatttcaaaaggaaaattgggaaaacaatcattttaacagcgcccaagccaaacacacctgaaattatcaagttaacagcaaacgttgaagacattgagtaccacggtgatatgattaatcacttaatagacgtgttatcatatgacaattaccacttattgagtgaagaaattaggttcaatgctggttatttgttaatgacattgattgagccagaggccataatgtcgggcctaattgacccaatggacattgaagacaaattgaaatattatgtgggcaaagttgacaggtcaacaagccaacacaaataccatttgattatgtgtttgcttagggtagtgccgtatgacgtgttaacattgatcaatgaccgcaacaaacaattgattgttgatttgggggaattgagccatatcgagcgtttgcaagaggaaactgaagaatatttgccaattgaccagaaatttttagtggagttcgtaaattactgccgatcagccaatgatggcgaagaatacatgccaatgaatggagtgaagttaatgagcagcccactcaatgaccttaatggtgaacagaaatccatattagagaccaaattattgcgagtgatgaatgatgaagtggccagtatgggaaagaacggaagccaccatgattggttaaacaccttgaaatcattcgtaaggccaatggtaccagaaaacaaaaccattaatgaagtattagatggtgatgatgatgataaaccagtgaatcacgacctgaaaaatgaaaatttgttacgcaagtttgtgaagttcatagttaaacattgtggaccgttattgcaaaatctattgaatgaaggcaaatcgctaatggcaataattaaaaattcattcattttgatggccaaggctattcaaaataaattgaattatattagtgacatgatggcaaattcaaaactgtttaagaacaaagatagagccaccttcaaaacactaggcatatcgaaagtgaaggcaacagttctacttagggaaatttacacaccaactgaatatgagttacaaatagcaacaaagtgggttatggcacaagataatgtcacaggatggatgaatgtggcttatcaagtagctaatatgaaccagaacaaccaatatgccaacataagggcttggtatatgcgttgctcacaatcatttggtgaagttgaggcattaaccaaagaaaatatattagacatgatggcttcaatggctgaaatggatgtgagtgtggtaacatcaggaaggcgagcggatacgttatatgcattacatggcattgttatgttaactaatacggaagaaggccaattgctgaggacaattaccacggccaggatctatggcataaatgataccaaattcatcacgtgttacaatgaaaccactcgccaagtactcaaacggtttagcggttatgatttcatgaatgaaagagacgccagtttagtattgatggacaattatcacaagtatttgcaacaaatgcattggtcagctaaaggttattacaaaatcgaatattggctgggcaatggtattggtgcaatcaggaatgcatccagcaaaattgtgagcaaattgtctggattgatcatgaaactcattaatgtcatgctaatgggatgtgacacactgaaaaattgggttggagtgctgggcagtaatctaaaagcaacatataaatgcatcattgaatgggttaaacagaaattagggatcaattcaaaagacgatgatgaccaagaggtcaagccagtaccaagaccacgccgttcatcaactggcagcagctcaagtggtagtgatttcacattgttcttgaacagtgataactcaagccagtatttcactggtgaaaataccccaacaggaaaagacaaaggtaaaggtaaaatggtttacaatgatcaagaaacaagtgattatggtcaatataccgctgatgagattgctgcgcaacgattcgaggcccaagagctattgtttgatgcgatggtcgaaaaccaaaactacaacgaaggcacaagtgacccaaaaaccaaggccaaggaggctttgttacgagaatatatgaagtacaccaccaaatcaacatcagatgatgaccaagatcatgaatatgaatcaaatggtattatatttgaaactgatgacacagaaattgaagaccaaggaggcttattctacactgttaagaaaatcatgaaacagatctttgattgtgggtatcagggagtggcctggttgactgacctgttgaagaaaggatatgaattgacctggtgcaatctaattaaaatattcgatctaatcaagtccaagttcggaccaaagaagacaaatgacatttatgtggtatttaagcaacgaaataatgcaaaccacatgcatgttggagaaacagaggaagatggttcatgttggtgccaagcggcatgtgtatgcgtggatgcagagagcaaagttattggagaaacgcattcgaccatgttcaaagtttccaaaacgaatacaaccaattgtgaacattataacaacttgaaaggcttaacaaactttgaggcacttggcaaaggtttcaatgccattaaaaccggcaaactactaagtgtatccataattaatggtaaagttcagcgtggaagggaccacattcacttcaaagaccaaaccgttgtaacattagttaccagtgggaatactcaaattcaattgatcggcacattttacaaacaagataatgtgttacctactggagacatcatgacagagtgcttcaacctggctttgcgatacgaaaatgaaatattagttggaaccgctaatcatgaaactgctggtaatctgataaaatcaaacaccattaacagcataattgatgaagtgggaccgcaatcaagattgtttatgtacgacgacggaatgtacttccaggcatacacaactttcaacttacattgtcatgaaatgttcagtaaagcagcagttaaaaatcacaattacaaccattttgacgcgactaccatttggccaagttacatgcgcgattcttgtgatggtttagatttggccacaacatcagtgcgctcacattacgcgaggaacagccatgtgaggaatgggcaaatacattggtatgagagcaccaatggaaattctgaactgatgggcaatgaaagccgcaaatcgctgagcttcgcgactggagttgaaatgtggcacgatgataacttcattggcctgaacatgcgcggtaacttgcattggtcagtggtgaatgaagggccactgcgtattcctgaattcaaggcaaaacttaaaagcaaactgattaaaattaatgataatgaaccaaatgttgaatgtgagagcgaaacgtgtttcaatgccatcatgatgtcagcggcaatggttcctaaagatcagtgtgttaaaggcacggctaaaagtgttagcacatttaatggtttaatttcactggcaagtgcaaatggcatggtgtgtgaatgtgaattaaatggtgtgggcagtttgttggcactgtcaaaccattacatcaatgagcatgatattgggaaatatctagctttaaattgcatattggttaaagataaacatgtcggcattagtgaagttattaatttaactgagataactgaattaaatgaactagacatgatggttaaccaaaacccagtcttagcaattgctgctgaacaagctagaattattgaaccaacaatggaatcaacagtcatggataacttcgttggtgaattccctcctaagaaaatttggaaaggatggaaattggttgaaacaaaccaaccaagtgttaacacattaaaattaatacaaacgatgaagcagactggtccaggtgaatttaaatattcatacgatgtgcttggcaacagaggtgaagtgaaaatttgggttaatgactaccccaacatccatgaatcatcagagttgatccttgaaactcatgatgggatcaaagccaaattgacatcaggttcaacacggaaaatgtatgccaccaaacctgttgatgcaacattgaaatttgccataacaatgctaatgaaaactatgggcaacaagagaactagtggcaaacacccattgttagtgattttaacacaattgagggattggttcaaacgacagaaggcattaatggctttgaggtgggctgtgcagaattgggattcattgattcatgtgcgccagactaattacattgatattcgtcaagaaattagaaacaaccaggtgttggctgtgtggatgaaacattgtaacaacgtttaccatgaccatcataatattatattgagagatttaagcatcggtaacatgctatattccgtgcacatgaaattggttggcaaagaaattgtggttagaacatattgcaatgtaagattaggaggaaaaacatataagtctacacatgttcaagatttccttaagccatacaccctggtagaaacgaagttaaaattaaaccataaggtcaagaaaacggttaaaattaatgaaactagcagtatgggcaacgcgttagacgtttatgcaaacaaagtgctgagaatgatgcatgaatatgatgatgatgagaataacaccttgagaacgttaatccgcaacaacccaattcacatgcaaatgaaaggtggccatgtcaatcatgggaaaaggtttaatagactaggcagttcatcagtcgacaaattaacgcaaacattactacaaacttctttcactaatcatagattggtttgttattgtttgccaagtggtgctgggaaaaccactttaaagaacaaacatcccaataaattcattgacatagatgatgttatgcgcccggaagacttcgtagatgttaaaaggttccagcttgagcagggttggtccatgattaatgaaatttataaggaacgtcttctcacatttttagccggtaggacgtttgacaaaaacatagctgtcctttgtcatgggccttcacaggttgaagacgttgctggagaaattcatttcatcataccaaattgggtcggggacaagccattcagtcaatcgaacacagattcattaaataaagattttaaaacctgggaagataaggctctccacagtgataagtttaatactttcgtgtatagaccggaaaatcaccaacaggtggaagagtactgtttgaaaaacatgtcaggcagatcagtgacttttcgtgagcataatgtcaatgatttagctgaacgactaattgatcaaaatattgctgaaccgttttatcaatattccgaccacacaaattacgttaagtatgtgctcccagctgatggtaaagtgacgtcacgcactaattaccatagcaaaccaacaatgcaagaatttagtgttataggtaggttgcccgtggtgaataggccagtggttaacaaacaatcaaaccaattatttaatgctattacaagccgattgtttgggaaagagaaattgcggaaaaataatgtcacggtggaagaatattatgaatttgctaaagaactatttgttgacgaagctgattcactattggacatgtttaaagctagcccaatagttagcatagaggaagaggttctggcatggctagagaaaaaaggtgggaaagtggcgtacctggaacaatgttatgagtatgctaagaacaaacaacaagagttcacatacaagaaaatgaatgcccacctgaaagacgaacgcctcatgaaggaagatgtgcaacatttaataaatcaactggcaagggtcattgtttggcacggccaagaaaaagctatggtcttagcgccaatggtgtcagctgcgaaagaacgctaccacaccttgctggataggaaaaaatgcgtttatgctgatggaatgagtccattgcaaattaatcaacatctaaagaaagtcaagccaactgagtacatgattgaactagatctgtctaaacaagataggcaaactgatttgccatacatgaaatttgaacattggatgttgaggcaattaggattggccgacgttgtggttaattacatggatgaatatattgaaggcttcatgattaagacaatgaataaaattagggctcatctgggcaccactagggcaactggtggtgtcatgaccggattaggcaatgttttgcgtaaccatgtgttattgggacatattaagcagacatatgatttctaccatgttatgatcttaggtgacgattccttaattttcactgatgttgatttcaatgaggaggtggtaagaaaaattgcttccgaattccataacgtcaaggtgacatatagtaaacgacatgatagtggaattttcttgcaatatattgtggccaatgttgggggaaaatacattatggcttgcaacccaatgagattaatggaaaagttttgtgtgagcaaaacaattaataacgattttcgtagtaaagttggttcatacctgtggatgctaggaagtgagcccgaaattaacacggtagccaaagttttggacttaccactgcctgaatcacaagggaccacaaaagaagagagaaggctagcgcaatcaatttatctggaatgctctattttacaagttgatgacttaattaaggacatattgagcatgatggtcaatccaaaagttttccactataaagttatcgtttggagtgaacgcataatttatagtcagaggcccgattaccgaccaaccacaaatgaggcaccgagatttgtcaatcttgaaaattatcatgagttaattgacaggcaagatgaaattggcaaacatcagaaattgtgggacgatttcaatgaagtcggattttaa

SEQ ID NO: 1211 - DNA, 14718 bp, Ceratobasidium endornavirus G
  source 1..14718: mol_type = other DNA
atggcctcacatttcgatctggaaggatttaaanntgtcaagtatgatgattccccagaccaacagccgcaaatcgtggaaacattgacacaagtcagatgcccatattgctatacgcccctaataaccactaacacaagccaggagaatgcatctagcgatcttagactggttgagaaaccagttggcaacccaactgctgtacttgagatgctaaggtcactgtttggaccagaagctggccccaaagggccagtgtgggccacgcattctgatgcacatgaccaaagactggttgcaatggtactagctagattagacttcaaacaggttacgattgaagggatattaacccgtgaacaaatgggtaagctgactgcaaacttcccaacaataattgttgacaccgtagaaggtctcggcacattaagcgactcgctatggcgggcagagctaaaagcgtgcatcactctggcgcttgcccaacattccagcggttgggcacgtaatagcctaacggaaaacacagacattggtttagccagttccagcgctaatgctgatgtaacattagtagaatttacagcaaaccataaagatttctgtaatacaacctacattatagttcccaggtgcgtgcccgacggtatgtacgaggaaggagctggctcatgtagcctagtagcaaacacttatctgacccttgcgccagggcacacagaaccaactagcgtggacaggaatgcatatgatgccttaatggaaaccgattatctactggtaaacactggtagagacaccactgtctaccggaaggacattatggcacaaggcgaatactggcagctgttgcgcctggcccgcgtagtaggccagaatctacaccagtttgcaaaagcagagagacaagacttgactatcgaagtaccaatgtttgaccaacgtgcgttaagttcaaaattcggtgtaagcgcactaacaatgcgcaaaactacggtgcaccacaaattgttgaaagctctaactgtgcgagggttggggaatccactagttagttatcagtctatgttggatctggcattgggattcacatggcgccgcatcaatatgcatgaccgcacgctggctaacacagacataacaccagagttagccgccacacacgcgtggatagcgttattattgaccaaacgtggggcggcagcacgcaatgccactgcagaagtcgccgtctctcggccaggcatcaactcatttgcactgcagagcagcatggcattagccaatatgctgatcaagtctgtaggggcaactttaggcatcactaccaccgaatgggtctctgaagtggctctggactggacaggtagtcgcgtgacagcccaacaagcctcagctgcccttgatgagctagcagattggttgctaaagccaagtgtgtccacagaacgggtagcagagttccaatcactaacaccgagtagaccagcctgcaaccatagacactacaagtgcgaacataatggtagtaagacatgccaatgttgtggaaagcaagcaaacaacgacatttgcgaatgttgtgaaccagcatgttgggacacccacacttgtacgcataattgctacacagtaccgcacacttgtgcaatacagtgccagcacaaaccaggcagatgtgaccactgcagcaagaacggatgtatagagaatggcaaatgcaatacgtgtaggcaacatgatagtatcgagagtgttgaagtcgatatacacgattgggtagcttggctagaatcaacgaacaatgaaggaagtaataaaggcaataccaaatataataaaaccaaacctaaacgtatatctcatcgaatgcatcaatcgctaccgccaccaatcatgcctgatgcagtggaggtggatgatgaaacagctaccaagagttggcctaatccacaaattggaaccgaaggcaacaaccactcgcataggtgtgttggctgcggaatgctatatgagtgtaaacgtgacaacacgtgtcagcaacagtttgaaggcgattgcttacacgttaccgctgataaaccagacgaggtgccagaagaagaagcaaagtatgcagaggtgcgagtcaggttgctagcacacataaatgaacatcaaataacagcattagaagccgagtctggtagccggtggccattaccatctagagaggaaggttcgctgcaccagatggacggctggcccattggcaccacagtagaaagtgaaggtttgtatgcagttggggatgatgaaaccccgaatttagacacatctgcagcatgtgctagggaagtggctaggtattgttggccaactatgcaatccaatataatatcagtgggtctatcaggagcaacagcaacggaccaagacattatcaagtttgccgaaaaacatagcctgaacatcattatgataacggcacttaacaccaaaataatacgcaacaatctgtcaaactgttacggagtgttcatccatgatagttacaaagggggttccgatggccattggtacaatgcaaagatagttcaagtcaaacgacctgccagcttgataacttttgccgaaggtgtcaataaccaaatgttaaaagcattggccggcaaaataataggtggcatacccaaggaaagcagcggcttgacatcctacgaaaggttgctattagaactaactatccattcttcccacaaagccgaggtgagtattacctataatgatataggtttgatgcacaccacgaagggaccatacctagccaatggtccgatacatgacccacaaagaggttacgtacacatgagaataccggaacgcgatgttttgctagttgaacaatggctgacagaaacatggtcactggattctgatttgatgaaaccgggtacttacaaccacatgagctttgataacttggaacaagtacgtaaggtgcaattaatgggcgagatgatcaactacaaaatggcaagcagcgggaatgtcgacttctgcaacggcaggtataagctgccgaattacacttaccaagttagtacggtgtcaaaagtggacatgggttatgcttttagtatggatggtgtattcttgaagtcaggagattgggtagtggtgaatgatggtaaagaaacattcacgtgccaaataaaattaaacccgaatttcaaaggtaagagaacgttaggggtgctactcactagccgtaaattaggtgcctctgtcaacatcggttacacagcaactatcagtgccacgtctagcttggtcaaaatatgttctgctatcaattggaaagtagacttggatggcttcaggagagcagtagaaaatcctgtgatatcggttgaagcaccaggaggctggggtaagacaaccgcaatcatcgataaatggcagccgggacagatagccttagcttggacatcggggggtaagactgcattgcagacgcaggcgcaagctgttaagaaaagacatgtattgatacaatccgtggaaaaagtaatggccgagggcttaccgccgggagtgactgaagtgctattggatgaatcatcactaacatcactgtatgacgccagtttgatctggaagccgggtgtgaagttccaattctttgctgacaattcgcaggtaggcgtagtggatttcagccccatggcaggactaaggtctccggtcggggtgaccaaatttgtcaaaacaggtatagccaagtacaaccatcaataccgctatgctgagccactatgttcagagttggcgaaggtagtgcccggcttaacatatgccggacctgacaagagaacacatttcgaggtggtgaatgaagacgctatgaacaggacgacatatagaaagttaattaatatgcataaaccagacatagtactggtcttttatcgtgcacatgaacaactactaaagagttgggctgaaccgggcgccgtgacgattgacaacgtgcctaaagttaaaatagtccaggaacttgcacgtgtacattcattccaaggtaacacgagaccgagagtcatggtcttacaatggagaatgggcaacacacctggcatagaaacacagtcaacctactgtttctccgcagcaacacgggtgtcagaacaattggtttgggtatcagtcgccatgtttgatcaaacaacaccactacatgaaagaattggaacagtgagaggcagtggaattaactccaattggcgatcgttatcttgggacatgacaatggccaagttaagacaaagcttaccgcaagcaccacaaggggaaaaactagatgaagtgctgagtgttatgaagaaatctgcacccaaatttgaagaacaatacggggtaggtgttagtttagcaaaggtagacaacaaggtgtaccttgaggcgaggaagttgggcatacacatattaactcttgagataaatgagcagttagatgttaatgtgcaacacgacccgactggatcagtgactcaggctgatatagctgtgatccgccagcagatattggacagcgagcgtgcagtcgaattgtccactgtggccgtcaccgaagcatggtgccaaaaccacatgatggcataccacatagcagtgcgcgccgcagatgtaggattcccaatagatctaagtatagggccgataaatgtcaaattgttaccgaacgcggctgataaatactgcaagatgaattatgaaataagggacggtaaaaacagcgcattagttactgtggctagagacccactgcatggacatctgatacagtttggtctcactggtaacgcggaattggcatactcaattatgacccctaacatggaacaatcacaagtgtcagaggctttacaaaatcttttaggtagacgaatagatgcacatagatttgtgttggcacacatgatcgaggacttaggattcactgtcctagctgcagctatgaatttgcttaactttatgggcatcagcaaggacaaagcagacaaacttgtacaccagtcgtatattaacaattcacaacaaattgtcagggagatgaaagaggccgtaactaaccttgaccaaaccgagggcacacacttggattggtggaaagcgacaagtcaccagcccgtgaaattcatacgcactccaacagaaccgggaccaaacgtaggcaggtacaaagtcacgcattacgcagcctggcatgatgcaaacacatctgagttggagtgggtctctagtgaccctggcggtgaagaaaaagaacaacaagtcataaagttgtggaggcacgtaggacgcgcagcagtaaacggcataggctttaatcttttagataacttgggcctggccgtgagcaaagtgggaggcctgccgcctatagaagggctaatcaacccaattagcgaccacttagcccgaaacactgaggttgctagaaagataggaaattacatggcggcggctgcgcaacggtcctggaatgctgatccaggtccgttgtacttgccgcgcacttgggacgaggatgcatgccgggacatgttaccgggcagaaagataaactggacaagtgagttggtgccagcaagtcggggccggccactactatgcattgcactactcaatatgtatggcaacttgggtcaaaggcgtgtgatgtactgcaaccacccccaaatagccaccgttgcaagggactggaacataacggttgcaaaaccgggcaccagtcaggaacactcccctgattggtccgacggtcaaaaacagttgattaagacctgtgaggctatcacatcaatagaacacaacgatgcccctgaacgcatgacagacgggttacggctgctacaaacgaaaatgcaagagcagctagtgagcagaaccaatggaccgctggcaagggatggcgcgataagaccggacgaattccagggatgcctgatcgggccagatgtcctgtggcatgaggctagcattgaggaactactccgtaagcatggcgagctttattgcatgctaccaatgggaaatgactggcaagaaacgacgctggaaaattcaacatacctagttaacgtcaattcaggaattaccatgcccaaacagttttggcatgactctgccatcacagggagtctcctcaaactgagcagcgatttattattacaggcacagttgtgcggcgccagccactcgatgtttttggtgaagttgactgatggatccaaggagccgctatcctggtttgcagaagacatggtgggcccgtatggggctgagatgctgattaaattgcctgtcataaaattgaacccgataacgatagtacgcgaagccgctataatcgagtggagagtggtgagggtgccacgcagactaatgcgtagcttgtctttaaggatgttacgagaatcaatgagcttggaacaactagagacagcaggtagaatactaggatccacgtacgaaatggccacccattacgttggtgacaaattcaaagtgtcagcccagaccatggctgattgcgtgctcgcagcttacctaatgcacagacctttaatgacagaattccgtgctatggctgacgtgcttaatagaaatgctggcaatcaggtgtcaaagtacctgctggatatggcacagggtgccactgccagaatatcagacctgttgggaggaacatccagacctgaagacctagccagaatggttggttcaattatccaagggccgattggtaaaattcttgaaaactatgccgatgaaatggctaacttgcatgcgcaggtattagtacagaaacctagctacaagctctacttctatggcagagtgctaaacttcaccactgtacacgatcagccgacaaattacggctcagagtatcccatatatagggttatgcaatatgttccagctataatacgtgcaactttcaagaccccagctctgaacgcacctgcaccagtaccaagaccaaatttggcatcgttgggcacgagactacagcccgatacggcaactgggctgcaactgtttagcaatggtgtcatcaactgggacgaattggtatctggggtgattgacatcgctggcaaagacttgacaccagatgctgcgaaagcaacgctagaatttgagcaagctttggacacagcgttgaactcaatacaacagaatgccaagatgcctacacacttgcgtattggagctaggcaagcggctaggaaaaccaccatggaacagtctctggagcatttggtgaactttacaacaaacaacagcgtcagcaatgccaaaaatttgatagatagttgcaataaaggcatgataacgaagtacgcatcagaaatgactgtaggactgctatacatcggttcaactggtgacatgatggccacggcacatttaattctgatcttagtaggcttgggtttcaatgtagtctgcgcttgtccgttggcccatttacgtggtctagtcgcaatcatagatagggtttcggtgaaagcaatagctgaaacaatgcatgattgggatgacgacgaagagtggaatgctgcggccagtgataaaataataatcaagactaggggtggtaggagtgtgcggctcatgggtctggagtatgacacaactgcggctatacatgcagctaaagttttcaccaacatgaaatttgacgagatgaagaaactgatgcaggaaaaattagtgcactgtacgatgccgctagatcgtaatgttcgcaaagcattctccacgtgcgacttcatcattgggaatgcagctgcaccgcagggtagattgctagcagacgggatggctaggccatacctacaaatagcctacttgccattcggcttgacattcgcacgggcggacagcttgcagcgggtgttagacttggtagtcagcaccataactccaggatttgttatcgctgcagctagtgggcaacttgacagagaagctagccaattgtataacctcgcagattggtcaaggcacgccatagacaatcctgtactaacacattattgttgcccaaccactagctttatgtcattgaatccacaatctgagcccaacaaagggcctatacttgcaggaaggttcccatgggaggcaggcagctttgaaggtcccacgggtaaggttttgtttgtcactacgggtagcatgcctgggaatgactacagtagtattggggatgcaagtatgatattgcagtcatatcaataccacactgtggtgttacacacaaagaatgaagaggatttaggcaaactagcgttatcatttacaaataaatctcttaccaagttaccaaatgatagttctgacctgcctgacacattaaccgtgttatctgacggagactggttatttatagctgtgacgtcactcagattagaaaggtgtcttaagcatacagacatactactcagccactgtgggcacggcacctataactgtgcccgtgaagttggcgcatacatgataaatgatccccagattatggaccaacacctatgggcgaatgtagctgaacttaataaatttggcgtgccatggagtggcgaccgcgcaaggctgttgccgagggtcagtagtctgttgatgaacaacgtggaaccagtcatgggcgaatcaatggaagacaaagcccaacatcttggtgcaatgatagcatcaacactgtcatcaaacggtatagaggtgaatccatactacgaagacttatattatgatgcagatgctgatatggcggacccttggaattcagccaatccaaacgcacaacccagggacgatagtggatggggccaaccatataccgagggccagcagcagccggaattccagggctggggcccggtgcccgatagtgggattgggaacggcacccaggcacaacctgaattacctgaccatcagacgactgtagaaaatacaggtgaatggtacccaccggtggccggcggcctaatactagcagacaaagctaatatgtcattagccgaatgcaaggatctgaggatcaagtatgaccctatggacgcgcagcaggctgcgggcacagcttcttgcgcactgtggtgtttggcaaaaacactatacgacaattttgagcccgaattggaagatgtagaagacctgttcgaaacggaacaagactctgtgtctgctgaaagagacttacagtcagtcataaacaacctgacgggtctagatgttagtgaggtagctgaaggaggcctcgaaaggatggatatacatctactgttctccatatttggtttaaatacatatgacgccaacacaaagcaactatactgtccgtttaagacacggccaatagtagctatagacaccagccaagaccactgtaagttagtaacttgccatataatgcaggacgacaaaccgctacagatgtacacgaaaattaaccagcagcctatttccgaaaattacatttatctaggtgacaagaaggtcatgctgaagaccgacacaatagaatttggacgtatgtgcttaggatcaagcatgtgggacctgagtgacccaaacttacgtctagagttacgcagacaggtgaggaatgggcgtctgcggatgcgtggtcacaagttggatgaccaagcaggggaaccgaaagttttggtcttcaatgccctaagatatgagaattgctatctgatagagccgttaaatgggcataggccaatggtaggtaggctttatggcgtgccgttagtgaacggcagtgtgtccttaggctgtgtggtttcaaacacgcaaacaggtaagtaccatctggttgttgagagtgaagtcgaacccattggacaactgttgagcataagaacaagattattcgcaaccactgcagaaagtagaaacagtgacaaccgtcttgacttacccataactaacagtcagtcaaggaacgcggtcgagaaggcactaaaaagacctgttgtgcttctgtccggcaaggttcaaccaccagaagctaacgtctacttacataatgctgacaactatgtacatcacaaccaactgagcctatacacacagttgagagattgcaacgtgcaaactatcactggtgaaactatatacgttgatgatctacgccacaaaaacccatggaccaacgtgctagtcgaaggggaattcaggttaggcttgcccactcatacagtaccgtacgacaactcagaagccgaaccacaaagaaatgcagctgcattgaaatggtgtgatgccgttgcactagaacacgcaaacctaaatgagaccctatacttgctcggtcacgatgctaccagtcacgccccagctcatgaagggccactatcaatcattactgcaataattagggatgacaggggatccaggaattccctactacaggtgctgttcgctgcccgagggacacagctaaatgatttcattgataggcatccacaactgaattgggctaaggatatggttgccattaaaacagatacggcacaaataggaccaatagttgaatacccgttcatagcagacaacagctttatatacatgttaacagctgacggctggtatatgctgagtgtgcaaaaagaagtgccatatggaccggtttcattagtgccaagtgttagcgtgccattccttggcaatggtgaaccgggaacggtcaactgtgggacgaatgttagggaaatactaacagccatagacaaacagaacacagaggcaagtgtgggcacgcgacagattggaccaatatatctgagcgatgtcttcaattggttgaagagcacgatggaccgaagtaaaatatttaaagtgctaggaatggacgtgctacacctagtgagcaagatgtatgcagatggggtagacgcagaaacctgcttaatggtcatgccagcgacatcagacaaaaaccacgacctgcgtggcaagatgctacgactggctggagccgagataaccgagtgcccctcacatcctggcaactggtgttggatgctagatggtaaaacagtgtggttagtcagtggtcagctagcttacatggactgcccaggacatgtgaaagcttcggatggggtaccaacacgctggaataagaaaaccgttactcttaagtatacccagaatgatcccaagttctgcacgtatcatgggggatcgggggccaattgcgaaagttgtaacaatgttgatgttattgcccttttacacctgcagactatggcagaggttttagtgaaatacaacgagctagttacaactaacgagcgtatagggttcgaaatacctggtcttattgtagtacacggcaaaccaatacaggccgatgtagtcgaacaaagcatcataaactccacagcctcacaagcgatattgaacgttttaaaaaatgcgttcttccccatacacaacaaggatgtgggatatagggctctacaacacactgaccttgatatagcagatgtttccaagtggcccaacatattgtacaaaggttatgtagcagccgagatagcacaagtatgggttgaaggttcacgactcgacattaatccagatgaaattacaaggtacacgctacataagggtgaaacaaatagactgacccacaatgatagagtggttgaagtgaaaggcagcttgcaggcattgtgtgggcaaatatacaagcaatttggtaccaccgatttctatgaatttatataccataacgggcaaaaagggggacagcttcatggtgctgacgtggcaactttcattatatttaacgcagttgcggttattgagtatagatctacaatgtcattccaggactcagcggttccgattacaatattaccagaagaatggtgtgttgactatacaggcgtagtccacctagtgcatgcacgcaccatcacggtgattaacaacaaacccgtgctgcacttcgatatccagggcttatgtacagccataggtgcaagactggaatatggtgacaaagaaatagtggagatgcaggtagacacagtagtcacgttatgcaaactaagagccgcgaccggtaacttgttccaagtcgcactgccgcgcacattgcccgctacatacaaggaatggtcaactggcgaaggcaaactatggttaacgccaaactcaagtttaaaacagataacggaagcagaatggaccatacgtttccccaatggcagattagttgccacaagagtgcaagctgctgattatgatatacactatgccaattgggattgcaccagggattataaaatcactcgggaaggtatcagatttgcgaacccagcgtgcattgttaaacctagcacagttaaaggattccagagctacagggacactatgaatcagttcgattggtttactacagatcctttcgaggcaaagccaaagttggaagaccaaccacgagaccatcaagtgggtttcaagttgcaagaaaccaaaacgactggccggcccatggctggtgccatatgcatgccacccggtacaggtaaaacgtacttgtgtaacaagtaccccagcatattcgtagaccatgacgtgctggaacagcacgtgcgacagaccaaggaattccaagaggcattagctgtgagggattgggcggccgtgaacgcgatacataggactatgatatgccccaaaggtaaagtcttactaacatggacaccggaaacagtgccttatagttgctacagaatcggagcattagctttaaaagaagacccggtggacataggcccagacagggccaacctagccgctatgtgcaaggcagggtatgacggatatgagctacttaacgacagggtcgcggtcgagaatagggcggtgaaactagcagaacaatacctggatggaaaactagacggtatcagctcacttaaaactaactttgaagacatgttacacttccaaataatagatagcttagaagcacctgaattagcagtaagatatgcaaacacaaacatttataatcacacaccgttcataccgtctctcactagcgagataacaagagcaatgtatgacagggaagaaccacctatcgaagtaatcgatctgtttgagaatagggacttgacacagatcataacatacaaaacaccacgcacatttgtcaacaagcaactaccgactagtttcgagaatcctaacctcattgttagcgtgcgcaaacatacattgacaaagtacccgatatattcaagaccagtcctatctaagatgatatacagtgagattgaagccacacaactacgtttccacgacgacgtcaaatttaggaaatacaagcttgatccagcacatgaagctgcagaatttgcaaagacgtatttccacagggattggcaggagagagttaaagcaatgagtatattgacatggaaccaagaccagcttgcagcatggctgagggcacgaccagcatcagcaacattggcacaacacatggaagaggttgctgctagcttgtacgatgacagccctgtagccaaattaaatgtccacataaagatggaagctttattaaagtccaaaccaatattagtctgggatgatcaagcccgccggccgattgtgtggcaagataaattcgtgccatatttgtttgctcctatgtttctgcgtgcgaaggacagactaaagcagttacttaggccagagttcgtatacgctgatggcctcacaccagccgagctgagctccaggtgccgtgccgttaaaaatgggtgtaagttttacgagggtgatttggagaaacaggacagccggactgacattgacactttggacactagcttctacatctatgaacacttcttaagaatcgacccgatagctctgagcctatatcggactggcactggggtctggtcttacaaaggaaagttcgtgaaaggaatttcccgttataaagtgcagtctggcatggttaccaccgccttacaaaatgtcatcaacaacttgttggtacacaggaggctagtacaaaggatgggcaaatctatagagctgtttatggtgctgggtgacgatagtttgatgttgcataatggccacatagatgcagaagaattaaggttagaaatcaaacaatacttcaacatgttatccaagagcgaccatttcaaggcacatggtacattcttgcagatgctggcaaccgaaacaggaagtggcgtgatacaaatgggccctgatataattaggttacgtcgtcgtttcgaagtgactaatggtgttactgctgacccagtgggcacggcaaatatgagggcgttgtcatacttaatgatgctgggcgatggtaaaaggcaacgggaaatagcggcaaagttaggttatgaggaagagttaccagtctggtttaatatggatgacaatatcagaggcttgtgccaaaagcacgacatgactgaggtagaagttgagaacgaattgcatactttattggacatgcttgaacacccaacaataactgagtaccactgggaacattatgcagatggtttctcctttaagaaaaaccaaggcgatccatatattgctaaggcaggcgcagaccatgtacctgggtccggccggttttaa

SEQ ID NO: 1212 - DNA, 14228 bp, Ceratobasidium endornavirus H
  source 1..14228: mol_type = other DNA
ccctggtggttgatgaagccacagggctcacacctacggatctcgcgctggtgttaaccagcaatgttgaacacctagtactatacggcgacccgcttcaagtgggcatcgtcgacatgcacaacgttcacgggcatcgtgtccattacgggtgcatgaacttgtccaagaacgtacatcaccacaacatgacttaccggataccgatcttgatcggtgaagaggtgcgtcccatggtgccccaattggcatatgggcatgacaggcagggcaggatagaattgaaatattctgactcaatagacatggaactgattttctcggctgttagggaattcaagatacaagcgatttatgtgttctacagcaccactgccaatgccctcactagggctttgagggggacagatttgcaggtggtcgtgaacaaagtgcactccgctcaaggcagtgaattcgaccgagttatggtgatacaaggtggtggggtcaaggcaggtgctggcctgcatttggacaagaactactgtttcagtgctgtgtccaggacccgtgagctcatcttgtggtggagcatagggtgccatgacaaagccagattgcgtgaccgggtgatgggtatcaccactgacccacgcacgttcgataggaaagcggccaaggcggcgcttaattaccagatgggtgcaccaggcgctctaaccctcgctaaggaggtcatgaaagccattgagaatagacacatatccaccaattatgagaatcccatccccgccaaagccagcccgctcttgaaatacagcttagagaaggtgcatgagctgctcaagcaattcttgttaggacgtaaaggtggcgatatcaaatacatacacactgacgatagtgcggtcattcaagtgcaaccacaaggcgagccgtccttccagttcaacattcacccgctcagaggaattgaacatttccctgatgactacgcggggcccaatctaaacgcgttacaaagggtgctgaaagagacagtcgacactgacaggtttttgttgatcaacaaatactccattgaacagttctcacgcgagggccacgaaaacttcaccagcctcttcattaacttctgcacagatatgatgaacgccctctcaatgacagtggtggatgccactgcctctgacaccgaaggtgtgagggccactgctgtcacaatatccaatgatgaggtcatcacactgtttattacgggtaatcaatttgacattgttaaaaccaatgaagtcgaaggtggcattgaattcgaaccactggctgtgatggagtctttcgttaagtatcttgaacaattgcaggctgtgttacaagacatgaacgggtctgacatgattgcaagtgaggatgatcgcgccatgaccaggggcactcgccacaccttagaccctgatgcagctattgcagctgtgaggcagcggttctcaattgacgactcaatttctacagacatcacgtgcactgaatcaggtgttgtcaagcgatacaatgtgactgcgagtaaaagcattcttggctggccagtgcaaatgttagctgctgttgtagagctccacacactgagcggccaagtcgaggtcacacatttcaaggcccatcccatggtcaaaggtctcgggtacagcgtcgacgggcgcagtttcgccgctctcatcgccacactcacaaccgcacgaaccgtgcacctagaagttccccccgtgtcaatccccactctcacggtggaggacactgaggagcccgccattgggccatctttaccggctgaactctttaaccaggacacttacactcttttgagcatgaacccgaaccgcgggactgccggcagagaagaacagccgcatcccaacgtgcgccctgattcattagtttgggcttaccatgcgacaaggttggccactcgcgacatcctctccaatgttggtgagtacatcagccaaacacaaatgggcccgttccagcccctactcggtgttgaagccgttaacctcgcattacgagtgtggactaaggcttttaccacggttttgccgattaagaagaaggtttacaaccccaacacacaggaagaaactgtttgggagtgggagattacccacgccggggacctgagcatgttcgggctcaagaaaacaacggggatgaaggtcggcatttgcaatgacaccgaggcactggctggcccagcatcggttaacggtgttgaatgtgggtgtgttgaagaattagaatggaaaggtgttacaagaactggccattccctcactaaggtgtggttgagccggaacactgttcggctaatacgcactgtttcattctacagctcacttcagttgggcaggccgttaacaatcacacttgacggtgtcacatttttggccaaaaccggggggggttgcacggcatgtgcaggcctcgtcgtcaccgccctgaacggggatatcctactcacggttaggaagcagtacgtgcaattctttaggcgtgacgtcaccataggccagagtgacctcgccttgttcgtggcagctgctttcggattcgacgtgagggttaaacacatcacctcaaacaatcccctttcagaatccgtgatgcccgagcaactacaacgcattagagagctcggtcgcaccaaaatgtatgcctcagaagtgtgctcatacttaggacgcgctgatgatgaagctttggtgttggcagatcgcctcgccaacttcactatggccatcattaatagggcgttggatggtgataaagccaccaacctagggcgtttgatgtcacgttatgctgttgaccaacagtatttgcttaaagccatcccggatgctctcaactgcctcggactgcagaccgctgaacaagatctcgccaattcacacgaacggtttgacaactatgtcattgaatgccgaggtgacagctattccgtctttgtgatagctggcaccacactcaacagcggcgacaaccttctcatgtacaaccccgcaaagaagcctggcaattcattcgatctcgatgcgtatggggaaacgcgacctacatacaactgcaaaaactaccaggagctgctgtgtattgcggtgcaacgacaaagggacttgatcagtaagtacacgccttatttcactgatatactcgagtactacacatcatacggtgctaattatgacctaataccgaatctgaacattagtataaaagaacacaggtcagagcgaactagtgtttgggatagggtgttggagatggcagcaaaggtgcagaaaacgtcaaagggggggcttcgggacctacaatatgtgcctgagtgtttccttgaatcagtgaatgcacacgcgccttcgatggtgcgtagtttgaacatgttggcacataaccgacccatcatttcacagagcgttgacgctggggtggaacaattgcacaatttgtatgtccgctatacagtcggcgaccaacgtgtggcactagtcaccgcccaccctggcaacgtcatattgtccgggtattgggcttggcaagtgcagccacctaaagacctgttacaacgagactggtacatggcccaggttaacttattgcccgcgatggtacaatcaatcattaacactttatcatcccacgatgacaccaatgagaaagctgggttcttaaaacaagtgttgtcaaacaaccttaaaccactcatcaactcatccaacagtaacaattgcgacattgttaacctgggactcaacttggctggcatgtcactgcggtcagttagcgactacatgtgcggtgagaccacaatcgtttatggactgctacctcggcagagcataccacaatctgtcgccacgctatctgcggatggtttgtccataatgtacgcaaagagccgcattggatatatgattgagccggccatggtagcttgggccagacagggcggttcatacttcttgccaaatggtgtgcactgtcacatagcgattaaaggcgaactatttttccacagtttggtcaggattacacttacaaaaaccaaactgcctaacccagagtactatgtcaacacacatgatgccaacagcaatgacgcagtgcactacaccataccagttataaacatcacagctttccgcgcacgtgaagaaggcattttcaacaaccaacaagtcagggtgccaaccaagatccaacggctgttgtcactgagggctgccagacccaacaccaacttccacgacatgctgcaatatctgcgtacgttgcggtacaccagttattactctgccactggggtgttcaagcgcgacaagtcatggattaaacaagcagtgttgtgggcactggcagtgtacctacatgagggtgatttcaccaaccggttgaaggagctgactggcatgttgcctggcacacaattgtcaggcaacaccaccgtaaatgtgttagtcagcaggttacaagacacagctatcggcctgatggccgatgtggtgaaatcgctcaatttggacctctcgatcactgaagtggcggacgtggccgccaaatacgccgcactattgacaagcaggggcaaggaggcacagacgctcgtaacaatgatgcacaacacttcagttcagcggttggggtccgcattacaattcatgcaccatggggagacagcacggcctgtgatggaccggacgctggacccgcggttacacattcggcagcgggttgacgaaatcaccagacccacaccagcagcaggcgtgatatccgcgcaattggagcactcgggcaccacgatgtttgacgtcaggagccattcgaacgggatccacgtgtacacgctttccggcacgcccaatgaccgggaagtggtaaggctagcggtcgccaatcttaacgaattcgtcagcatgcaaaagctggtcactccaatggaacaacgcgacttggccaaagcagcgttggctattagaactttagagggcaccctcaatgaaattggcaccaacatacaacactgtaaagcgttggtggaggggtacaatggaccaagagtcatgttaatggtgtgctccgtgtttgacataccttctgcctatttggctttcaaacaaggttccaccctgataagggtcagtggcatgcgtctggaccgcaccaacttgctaagcgtgttggggttacccggcatggcctcacaatacgtgggcttagcacctaccaccgtcatggcacttggctggttccaattagacaacaccccagacttgagcaaattcctgtcctggttggatgagcaaagaattgtcgaattcctacctaattggtgcgccaaacaccacggcgcgaaaacagctggatgggcaccagtcgaaaccagtgtgacgcggccgggcaccgcagacacctacctatacttgaaggatggcgttgacactacgatatcacaattaaatacagctggcatcagttacacacaccataaccccggcacaccggcactgcacgcgactagacacatgcttgacattaaatcccctggcgtgaccaaagtgattatacacagcggcggcgtcgggaccatccaaatgtgcatcgacaacaacatgcctatggtaattgttcctgcctttggggaccaacaacagaacgctacggtgttcgagtgggccaccatggaaaacttactgaagctgggcctcaacgagtacggcaacatgtgcaaaaccgaatacttaaaatggaaagtgcctgctgagaaggacgagtcttgggcagccctaacagtcttggaattgcacgctcgcatgccccgcaagtacttcagatcactgcccgacaatcaaccggctataaatgagctcactgacgcatacaaggctttcattggtgcgccaccagcacatttcgcatcggcaagggattacctccaaagtgtcctggccaggcactacgcacccaggggtgttgatcaactggacagagtgctgtccgaattgcgtgacatcatcaacagggtgtcaccgacaagaacagttatagtgccccccacaaccagcaggcgttccatcgacagagaacttgtcattaggattaaccccacatcagccacgctcaatgtggacaaatataacattaacttcttttgtgacgttgacgaagtgcctttctactgcagcttacttttgaacgctggcttgccaggtcacgttgttcaatggggcgtcggcataattcagatgatctcggtctttgacagttcaacagctgtgagaaatttcactgtgtctaagggcgcaagaggctcaactgacatttctgcattcatgcacaatccaccacccaacagcttgagtgaactgtcagtgtacgtttcagtgtctacagacgctcggctaatgggtggcattgcactattccatcatgtggggcctgaagaagcagcagtctacatgaattctcgcgggcgcgcaatgtggcacaccaaccaagggggttactggcgggtcgactacccgcggtgcccagtgatcaccgttggtggaagaccaagcacgttggacttgcgggcttcgcggggcaggacaggccccgccagtggcgacgacgatgacgatgaacaccccgaacctgggtttgatgacaaagggggaggacccagtggcgcagacgacggtgacgacagtgattctgacagatcggtgtatgaggatgcggaaagcacgcctaggactggagcatcaacacatacgatgggagcagggggagacggtgaccatgagcaaatcgagcctgaaaacaacctcacagtctgggaaaagtttaaactgcactttgacaagtcttcagaaagcttaagtggcaagccggcgccggttggtgacattcgaaacacaacacctactgacgtggtagccaccgccccgattccgcagataaccgtcgcggaaccaccaatcttccttgcacctatgatagtcgatgcgctggaaggcaataacgaagaggccttgcgtggtttacccggcagtgcgagcgaaatcttcgagaccaccccaccatcctcgccccggttcagttggcagttgggtagcagcttgcggcaatgggacttgcaccaccgggtcccagctattgtcgacggtaacctttatgactatggtgcgaacgggttgcggctctgggatgccactggccaccaaaacgggatgctacgtgaagtcacacgattactgagcgcaagcacgttgagagaacacagcagcaaattcaatcaagggtcacttatgaccacaatccttatacatatcagtttcatggcacagtggtgcaacttaaccaccatcgccggcctcagcggggcgaaggcatatagtttggccatcgacagcacgatgtcgacattagaagagtatggcataaacggcttggtggacgacaccattttcgatgacgcaatcgacgctatagttgagggttatatttgggatgacgtgacccgtccggttcgcaattacacccacaaagaagtaacactagagttggtcacacgagccatcatccaccggtacacatccatacaacatgccagagaagtgagggctagcatccaagaacatcacgaaagcatggcagtgtctaggatccgagtttgggaaatcgaaggcagcccacagtgggtggctttcaacaagttggtcaatcacccggtgacattgactgttggagccgccgcggaggaaatatatggttttgaggaggttttgggagagttcgtggactccctgttcgaccatttcacggggccattcgagcacagatacaacagaaagagattgttgacacataggctcgaatcatacattaatgagagccccaaggatcccaacatggtagagaacctgagcaacaagacagctgcgtggatgaacacgtggaccaggcatggctacctacccatccatgctgctgatgatgaatgtccggaggggagcattgctatacctggatgggcgataagcgacgtcgatgaaatagtggctgttcttaaaaacgcaattgacaatagtgttgggagggtgagcttcaaggtaaagcaacaatttggaatgatcgggactattgacatccagatgccgccacgtgaaacggagggcttacaattgtggatgaaactaggtgcgcctgttctcgaggggcgaggcgcactgacgcatgaagagttcatagccgtcgctcgttcgttgggcaataatgggccagtaggccatggcacgaatgcggctgttgacctcagcttgtcaaactggtgtgacgattcaaagtggtgtgggagaggtcaccgcccacagcagccagcactgaccggcatggccactgagggagcagacgatgaggtggtgttctcacatgaaatggaagcacgcgggaattcaaaatacacactcaatgattacgggatcgagttaggagctggtgtctggtcagtaaaggaacgagacaggtattacaacatgaacatcatcgaacgagcctggtctgatagtaagaacttcataagggaccttgtgttgcgcggtgaatgcacctcggagtcaaccaccgaggacgccggcacaccagttggattaatagtgagagacggttccaggaatgtatttgtgtacagagaagacgcgccgatgaggtgggtcatccataaaccacaacacccgctactaaagcaccactcaacgtgcgtcacagtgaacgcacctctcgggtcaccatcagctgatgaagcacaccggatgccggtgctcaccggcacggaagccacataccttaatgaggcgcatgtaccaacccaaagaaggagcgtgcagctctccgtacaccgagcacatgcaggcatagatcctgtatggccttacttgggcgacagaatcacatcacaattcgctgaggcagttgaggtggtggcgagcaagggcaaagccacgtcgccacagtctttgtacaacatggcgatcgagcgtggtgctgccgcattagaaatggcaccaacagcattgcacatacatctgagtgaacaagaagggtggccaatgcacgatgaacaggcggataacgcgccctcaaacactctcagtcaacgcttttacgattggatctcagaattgaagaaaagtgttgatgattcttcggcggggtctgccggcatggctgcatcattgcaacagcgcgccttcggacagcccatgacagctggcgaccccaacccggggggacctaaccttgggaccgcatcattcaagggtctggcctcccgcaatccatccttcgccagaagcctaatccagatggccgttgcaacccacggcacgtgggtacttgacacattaccgtcttcactggaacacctagcgcatgaacccattggtactttgcctgccaccgcgcccgcacagggtggcaccacacaccccggacaaccatcagggagcccacaaccaatcaagcacaccagagggcgcaggcatgggaatgagaggagcaaacgttcgaacgcgcattcagggagacataagagggcccaagttgcgccaccagctgccaagcaagcgcgggaagtgggccgcagggtggcagtttactccaccagtcggtcgcaaaaagtcggcaccttacatttggaacactacaagcgtgatgctgtagcaacaagcgagaaatgcagagatgagcagaggtctgaagctatgcacgagttgcgtgatgcgtttaacagcatgaattatagcacagcgaaacttgcatcgtctatactaacaggaaaagggatgattgatgacgatggctggggagcacttgaagcagcatacagcggtcaaagctgggcagccccaatggtatacgccgctgggttggcgatggaaattaaatggagctggaacaaattgaatcggtacgcacgcaactgggtcaagaagatgaagaaaccagctgaagcggcggccaccatagctccacccccaatggcgccgccttcaccaccgaagcctgggcccggagggaaaggggcacacacggggtcggcccccggaacgagcgctgagtcggaactcgtaagtgacaccagcaccaagagggaaagggtgtttgaattcagggagaaagtgttcgattcacaaacgtctgatgctgcatgcgttgagatcctagaagagtatctaaggggcactgacgtgaatattggtgaactaaccgagagcgaggttgagcaagtacccgacttcatgcctggggaggaatccgtgccccgtaagtcacagttgaggcggctcaaaaaagcgcattacgccttgcaaagcttgcactaccgggcaaagaaagaatataatttcaatagattcagatcgttggttgagatgatggatggcggcgtgcccaagcaagaacgaaccaggcgagtaacgttcgtcaccaatgaagaaagtgatgaagaggcaacaataccgtcacaagggcaatattccgagattgagtgctatgccacctacaacgtggtgtacaaccctccaacacctgaaggctgcgtcaccgcgtgcttcaagcattttggttacgacgtggaataccaaagaaaccacactttagaacaaatatacatgttgtgctacgccatgggcattaacctgcactaccacaatggcaccaccgccacaatggtcaacatggggcgcgtgaaaacggtgcagtttttactaacagacgggcactgcgcatgcattgagttgcagaagcattcacgccccgtaacacacgacttacaaactaacgcgagctgcttgccagccaccacatgtaagctcgtccctagtccaagtgtgatgatccgtgaccgtaaagaaggcatgtgcacggggcacacacaccacaatgtcgttgcggaattggactacatgttgagggtgactgaaaacaagccactgccattgttgacgaaagccaatgacatgagctccatacgtgcttcctcggccggacgcaacctggggctcatcgctgccaggctgaaccggccagcttattacacgcgactgcaccccagggctgacggttacctagcggaacacgaactaccaccgtacaggctagtgttcgtgcttgacggtggtttggtacctggaatgacactaccaaccggtcccactaagttcgtgaacatatacacaggtaggcgtccacaagggtcaccgtcgagggtggtgattgatgcaggcaccacatggaaagttctcaaaatgccacacgcaaccgtgatctccagcccagtggatcgctacttatcaagagaatgcgcagaacactataagcccactgaagggcagaaagctatggcccccgggccgaccgccaaactgtacgtgtggagttacgacaacagacggcatcacttgtacgaccttcgaggttattttaactccatgccagcagaaatgctgatccttccaccgtccatcacaactgagcaactccagctgataagagacccaccggacgggcgacggtactgcatacacgacggggctttcgcactgagtgtggacttcctagacatgaagccaaagcagttgaccaaatggatcaacaggaaaacatctatcggggcaaggaatgtcaaggttgtgggcaattccatcatcataaaaggtgcacaaccctcattggacatcatatccaactcgttggcccacatgttcccaaacatggataatggtaggctgaccagggcatttagggatggcgagaccctgacgagggatgaatgcaaacaagtgtggggtgacgaatatgacgcgagcatagattggccggaagacacatgccttgtacaactgacgatggacatcagccagtttggcgcagaaacagtggacggccacaggtggagcatgattgaaggggcgaggccagtattccgcacgcgtggtgcatcatcattcgtgcagggcatccagatggcaggtgacgtaaggaatgaccagaaagtggaaaacaccccaagcgtacaatccactttctttagcgaccacgggaaaactaggatgggtgacatttgggccaccagcatggcgaggaagacaccggccggcatagtatacttagcatcagggggcggcaagagttggttaaaaaacaacgacccagacaccttcactgatgctgacgatatggttaaaatgccggcaatcacgaactgggaagcttacacgcaagggcactggacggccaggaatgaagaggtgagacgccaaatgatgcaaaatgcgcccctagccgcaggtaagatattgttggtatggcaccctgactgtgttcccgctcaatggcgaggcattaagagtttgtacataataatcgacgacaccgaaggggagcgcctgttcacaataggcaatgagagcctcaaagcattggtggcacggaagccgaatttaccgcacgtggtttgcaagagggaggagaatgggaaacacttgcacacgtatttcgacttggccaacaagcgattacagcctgtaaacgccatgctcatggtgcacatgcaagatgtgaactcatactcatttgaaagcacatacatcaaccctggtgcaaagccattgataccattccttaatgcaaactccgtaaacgtaaacatgcttactggtgtgcagccaatggaggatgaagtgaccgtggaagccataaacatgtttgaaattggtgacctgagtgactgggtcgagaggaagggacccacggacgacatggtgatcaaatctactgagaaacctggccaagtgggggaaacgtcaaaaaacactctggtccgatacccggtatggtcaagaccggtgttcactaaggtggtacactcaacatttaatgcagtgagcaccaggcacggcacagtggagcacttgatcaaatatcaattggacccgaagaaagaagttgacacattcaccaaagcttggttcagaacagggtggcaagaagcatgtgagaagatgcgccagacccctgtgagctttaacccccaagccaccaaacagtggataaatgaacgaccagacggggtgaaggtcaccaatgacttgatgcaaatcttagaagaggggattagcagtaaccccatcaacgcatggaaagtccacccgaaactagaatccttgttgaaggatgaacccatcaacagtccaccagaacagaaggtgcgcatcattgtatggcagagatacgggtatgccgctatattcagcccaatctttatagaattaaagaagcgcctcaagtcgttgctggccccacacgtcttgtatacggacgggtacacgcccgcggaccncccaagagcagttaaaggattcagcagattcttcgagagtgacgcatccaagcaagacaggcaggtgactcatgaattgtccgaaattgaatacctcctgtatgaaatgatgggcatggacccacaagctctaaggatgtggaaacacgcagaggtcaattgggacgcaaaatcccagggcatgagaacgcagttggacgcgaggatgatgaccggcagttcagctacggccattaagaatgtcatcaccaacttaatcatccacggtgatatgtacttaaaaaataaggaccatatcatgttggtgctagtgttgggtgatgacaacctaatgttggtggacactgtgctaaatctagaggggtaccgcaagaaagctgccgaatattacaatatgcacatgaccccaaagtccaatgacaactttggcacattctgccagatgatcgcttacaagacggccgagggtacggctgaaatgggccctgattttatacggcttgcgaggcgatttgaggtcaccaacggcgtatcggaggctagtgacgaaaacatgaccgcccgcagcatgtcttatgctatgtggcttggtgcaatcccagaggtcgagcagctggtagttgaaaagaattggccaattaagccactagcgtggtatgaccccatgcgttgcgctcacgcggttgcggaaaaacacgatatgacggtgccgcatgtcttaaataggctaaacaagttgatagaaatgatgggtgacccgaaaccacacacttggacatggcagcactggacaccactcaaatag

SEQ ID NO: 1213 - DNA, 11575 bp, Chalara endornavirus CeEV1
  source 1..11575: mol_type = other DNA
atgatgatgcgtgggggtgatatggaggtcgaccaaactgctgcagcttaccatggtatgttaaccacaaaaatcaacttcaagctcaagaagaaaactggtctaaaccgcagcattagggacctaccgattgttggcaatgcctcaaagaaagcagaagcagaaattgccaataataacctgcgggtgaaaaagtggattgaccacgagtaccatggtcgcccatcagcactcatcgagcatttgaccaagattcaaccacacccaacggtatccacaacgccagacgccagacgtggacacatccttatcaggtgcgcttgctgtggtgcttacacagcatatggcatcaacaaaccaatgagcgccagacccggcggcggtaggatgatgcgtggcagaatgcgcggacccatgaggggaccagcggcatcaacaccagccgcgccgcccacgcccatcacagccaagcagatcgccacagccccgtcagtatcctggttgtaccaaggtctagtcatgagcatgctaatgaccaccaatgatggcactgaaggattgatacctcttgcttgtttcaactgtgggcactcttacctggatgaattgatgaggtatgtgcacatcctgcagggggtggagccgacagtgcacacaacgattagaggtacattattagaatacttcttgaaggccaatcaactacagggtgctccacccgaagcattcactaaatccacacaactctacaacgacatagccaatagaaaagtgaatgctatgttgtcaaaactaaaccccacccacctcaacttcatttttgcactatctgaagagacggtatcatcaacattgagtcaccgtgcctacttgagtcataatgcgaaagcaacaatgttgcaaaacgaaatgaatgctctggaagtggaagaacttagcttgttcgcggacttagtagacactctgggcaaacagattattgtgaacccatcaagtcaagtaactttagcatccatgattgatgtcacaccagttgggttcgcaagctcatggttctcccacatcaacttgagttaccaatcaaaactctcgccaccaccagatgctaaacaaatacttattgcgaccgatggagtgaacttgagtgatgtgataaccaacggtcatatgctgctcgtccctaggaccaccctattatcgcacaatgacgggatttcagctaacagtgtcttcactgaagtcaccagctgtgacataccggtggcttgggacaagaaagcaatcacgatattgaacaatgcagcttcattctcaataggtggaaactggtatgatgctcacaccgttgcttgtaccaacaacctccagattctgaccttcacacaatgtgacagaccaacaggcttgcgcagtatgttgaatgacccaaatgtagaagtcaaaattcccattatcgacattaccaacccactcagtaccttgggcgtcatcggcaccacttgggagtaccgcaaagtcaacatagatttaactagaagactcatcacatttgctatctcaggtgaaaagtcaattagtgctatcggagcgtacatggcaggattggtgtccacgaggtacgtagttggaaaccgttcagtagaccttacccgatttggcatctccgatggtgtcccagaactaacgatggcctgtttactgctgatgaacaggaaggttttgtccacctgggatgccaccctgttgaataacaacatggatataactaagggcagcaaacaactggttaactacttgggttccaggttgttggaattgttagttaacttagataaccccatctcacaacacgtcaaatcatacttagaaaacggaacaatctttgaggcgagaatcgcggatctagcaagagaactgaatttcaccgacatgttgttgaacaacactccatacacaattatatcaggagcgaacaccgttgatgtgatcacaagtggttcggtggccatcagcggctgcgtgcaccacaaatccacgtgctctcacgacactacgggcaaacggcagtgcgtgtgctgcggtatgaccatacttatggggaccctttgctcatgctgtaagggtaatcacacgtgtaaccacaaatgtaatcacaagtgctcaggtgcttctgcccacatctgcacgatttgtgcatcaggcaaccactgtttgaacagatccgtctgtgagtgctgtggggtcgaatcctgtgcgccttgcagagtttgcaaatctgaattggaattctcaactttcacaatggtacccaatactcggttagaggaaaccaagaaacacaccaacaaacaatcagaacttgccaaggaattggttggaccgtcacgtacccaagtggacttgatttcctccactaccagacgatctgaattgcacactagtggtaataaagtatccattccacttaaatccaccagcggtggcaccccagagacgtttgaaacagccaagtccgcatcggtcaattggaaatcgattgtagtttacaacgagagtgacgtgtttatacccacactttcagtgaaaggcgatttcgcagccagtttcaagcatatgggtaaagagcacgtcgccgacatcatcaacgttgaaaattactgcggattgaaagccatcgctacagctacaggcactgattacaacagtctcaagtaccagtacccagaactgtctatgagtagtgccgacgacttgaaaagagtagtgaaagctacccaactcaactgcataatcatagttaacgcctccagtgggtacatctgccgccacagtaccatgaatgacaattatggagtgatagcattaactgacgccattccggagctacagcagtctggtcattggattgtgactcacttcccgggtcttgatggacaacctaatggattctactaccccatggacttcggataccctttcaaatcactggacaactacaacattacgcaacactcggatgcggagaacgtggatttgcgagctcagcttgtgagagcttccgtacgtgcacaacaaataggtgcgacaaccataacgccaaccgttcaaatgatcaaccgttccacttacctcagcaatggagactcccataacatagtggatggccacattcacattgagttgaagcctcaccaagcaacaatccttgcacaccttgaggataaaattcctgacacggcttggttgggagaatccgccttctatgaggacaaatgggatgaccttgaacaggcagtgaatagcgccttgaaactaacagtaatggaactgattcgttgcagtagcaacctccgctccaattacaaacctgacgtcggcggtgctgtgcaactagttcgtaccgtcaacgctacgaccctatccgatcccagcctcaagacacttgacgtagtgtgttactgctctcacggcaagtggtacaacaccaccgtcacgaagacacccaatggtgcaacggttcaaatcgcagatgctagtatttctgaagtttacccaacgaaagtatctatagcgagtttgtggcgtagaatttgcggacttctgaaagcctacaacaacctgggcaatagtgcctcctgcaagtttgtcaccgccgttgatggtatcgcaggcagtggcaagacaacgatgatccaggccctaccaggtcttcaaaatgcgacaattatcgcaaagaccagggcagcactatcgggactgtcatcaacaccctgccacaaactgatgtcattagaatcggcatcttacaccaagatcaactctccaaccattgtagttgaagaggcgggcatggtgttgccgacggaactattgagtgtgttggatcaaccgaatatgcggatccacttgttcggagacagtcagcagatagggttggtagacatgcacaccacacctgggttacgtggattcgagtcgatcctacagcgatttaaaactgagaccctaacaaaaactttcagattcggaaacccactcgcaagggattggatcagtaaattctaccccacgatagaaacagtggaaacgaatcagaccacttacggctactctcgtctggattccatagaagaaacagtttccgtggcaatcaactctaaggtggacgcgatctactgtttcttaagtcacactcagcgggtcatccaagatgagttggcagcacgctctgtagacataccagtgttcaaagtgcactccgggcaaggagctgagtttgacaaagtgttggttgcgcacatcggaggtggtgctagtcactccggagtaatgtaccaaaaatcttatgttgtgacagcgatgactagagccaggaagcatctcatttgggtcactggaaacaacgggccaccatctatgcagtcattgcaacgcttgttgctaagtggtagaggcgcgtgggtggatgtcgccgttaatgccgataatctctcattgactaggcaactgtcacaattggaagtcatcggctggaatgcagcgctcaacagcgcagttttctccagcacaggtggctggaacgctaccgtgcaaccggattgcattttcatcacccaacagactgcggttggtctcatcaaattccatatcaacatgcaagggttgcattgtgacaacctgctaacttcactcgccaagccaatgatacaacacaaaatcaagaaagcgctgtcacaatggaacgtgacagaatccgcagacttggtatcagaggttccaatcaaaacgctggaaatgcccggagccttcccgaatgagaggaacttgcgcaatgacatcatgatcaccaaatcgcaattcagcctacacacactagcgaagctgtacactttgggtaatatatgtttagcgggttggacaaccagaacccccatcgaactcaacatcagcggcactaaagtactagttaaacactttaatggttgtagcttgtattgtggtttcaagttcgagagtgggggtcagacctgtctaatctcgagtgcacatgacgagaagtgcaaagactccttactgttcatgctaacaccccacatacgggcggtctcaggtgataagggattaatggtcaagattatgccttggctggaatccgatgactgggcaggtgtgaacacgtcgctgctactaggtgcttacaaagaacgggtagcaaatctgtggacgtcaataggtgatggatgcagcacggataaggcaggattcacgtatgctagcaccaacaaaatcacattgcaaagtttggcagattactcagaagtgtggcaaacacccacacaccaacaagtaaccaaacctttgcttaaatcaggtgacggttatcgttgtgcagccacaggagtacaactcagcacattccgtgccctaaccatgcattacgcaggagtgggagctaatgaagacctggagctttcccgcgcgaacatgggggtggcagatcgcatattggagtctcgttacaaggcgatgttgtcgggtgtgcaacctataacactacctagtaatacattcaactaccacaagttggctgttgaaaaccaccttggtgccaaccacattacagtggcaccacgcacggccttaagtgcccacagcagtaacatagctaaaatggctattgtgtcgatcttaaataccatcctcaacaaaccgttgattaccatagcaccgatggatgttgtcaccttcgtgcttaattaccggaaaggcatgcgcttgtatgccccgatattgaacgttatagaacgcgaggtcgtaaccaagttcgcaagacaaaagtttgaacaattatccgcagccctggaacgatccaacaaaccagaggaacgtcaagccattaaggaccaagctgattggttcagagacatcaacaatctaactacgaactcgacagaaggtctggtcctaacggaccctcgctatcagcacttattcattggtgaggtgttggtggtacaaccgttcgccatgagtgcggacactgtactcgacgttgataatggcacctggtcacacttgggacccatggaaccagccacaccataccaaaacacggatgggatcgcactgatgcacattatgaattacaaggtgtgtgtcacaccacctcgacacgctcacgtccgcttgtacagagatatggaaacaatgcgccatcagcgcagattcgccgcaacccgtggtcatctacgcacgtcgactatgcctgattacatttacaaaaagatgatggcccgtttctttgccgactttagcaccactgttaatgacctagttgcctacggacgctctctacaacagacagtgacctactcaagtatcggcgtgcacgctaggagcttggacgaccccacccaaattctagattacgcaatcattgtccacaacattggtaaacgccaagtcaaaacattacaactactggatagcttgagtacaccaaagacgcagatgaatccggaagtgctgtccaacactttcaaggttctctggggagcctttggatcaagcatagtcaaactactacaaagccgaccggaggtagaattacttaacgaattggccaaactggctgtatctgaaggagttggaaagaaattgtatgacttggcttccgacgtcgaaatttacgaaatgcaaccgaagaaatggttggtgcacatgtcgaccccagaaccagatgacttgactggtgatagcacaaatacgtcggacgcacacgatggtgaggatgagtcaaatcaacaattacaaccgactggctacgcacccactaaggcagaccccaacatggcaccaacttcagaatccgacacggataaagaccccaaaaccacccacgatagaagtgacgaatcaacttacgagagcaccaaagagtcgtttgattgggcaaatgaagtggaggaacacatggagcaagctgaaatgcgcaacgccacagcaaagccagtcagcaacgttgccagatggacaccacccgcccactgggaaaaggcttccagagagccagcgtggagcgtagttgccaaatcaaaacgcgtggaaatacccgacaacaaaccaactcacatatcacacgcgaataaattcgaattactgggtgagatcgggcggccagagtctaccgctcaacaaccaccaccgcaaaagacacagccacccgtactcacaactcttagccaaaccactaagggattatcaagagaggaagtgctaaagttggaagcaatggtggatatcccagctgcatttggtaacaaccaacctactgacgtgtgtttggtttacactggtagcactggggatagtcagccgttgaatgccatcgctgcggtggcacatgcttgcgggctcacaaccaccgctcttgctccagctgatgtctcattgcccgacaccatcactgttccgctcatttacaccgacacttacaatcatttcactgacagtcaagtgcagaaaacttggatttcctggcatcatatagtgaaacactcattggatgtacttaaaaaatggagaactcaagatcgtaagcacaaatatgtggtctcattgtttttcaacggtttctccagcttagtgcgtggtaccatagataacattaaactgattccccaactggatcaaaactgggacggatttgccagcaggacgtggcacaatgacaacttgctgacactactgggtggcactagagaactgcaattccagttgcacttctgcatcccggcgggtatgtcaactacgacaaacaatcttgggttcgccatgtcgaagagtgacttcacattgagtcgaactgatgttgatgacattgcttgtttgaggttcataattgcaaacaaacaccgcagagtcgtgttaatcacttatggctctatgagacctacagatctatctgatcgtgtgcggaaacagatttcggaacacgacggacaccccatcatcctggtttgcgacaaattgccagaaacagaactccagcagttctgtcgagcgggtgacgtgcttgttgtaccgagatgcaagcacaagttaatcttccctttggtttccaaagtagtatgtcacggtggtgcgggcaccatgttgaccgccatgctcgcgggtgtagatatggtactcgatccatgtgcgtttgatcaatttcacaacaagagcacgatggcccaattgtcacacaacatcgtcaatgacttggaacacgaatacttccatttccaacaaaacgcgtctgaaatgctatgtggcggcaacgtgggtgcggaggtagtcacaaccagaacaccaacaaaggtgactgcgatgctggacagggaaccggataaactggtgtccgtgcagaataagatggtagtgtccgtggagtcggtacccaacacatatgtgggtaactgcgtcatggcttgtattggggattgcatatcaaatgcaacagtgttagcctgtgtagcagagaacttcgaatccagacctataaacacagcagaggacgtggtgttactgcttgctgtgtcgggggtctcgggtacggtcatacaccaagatagggcatggtgtgtggagtgttgtgtggaggacgaagaaggtatgattcggtgtgatttgtggttgaataacggcttgacgcactgtgaattaatcaagcaatgtgagttgaaagtgacggcaccttccccaacattaatcaggcctgacttagtgtttagcgcactgggcaaagagcccatgcacatgttggttttgttactgaaccaccagtggtcaaaactgggttattcaacgactgaattcgatactgcagagatttcaccggcaatggtcatggactgcttgcacagctccttctccctgctcaccattgagagttctcgtattccaggtggttaccaagtgccatcgtcattggaagtgggtgtgttgtacttgtgcataggcgaccagggtagctgctttggattatgtgtggacgcaggaatttcaacatcgggtgaaatcggcaccgtcattataacttcaagcaatattggtgatcacatagctctggttagcgaagtaggagagacaaagttgcatcaattgtcacatgcttgcgtcctcgatctgtacactaacattgacgtcaaatcgcaactacacgaaagggcattaaccgaatcatctttcatatcggacgacgactcggtgacatcgaggactgtggaagcgcttgacatctcgcctacccattacactctcataaccgatgacatcattgcgcagttggatgcgggtgcgcctatcgagcgggtacccgagggtgatcaaaagaccaggggtttcattcttgcatcccatgcgattggagtgagtgagttcaccagaatagacagtgagatatttgctaagttgcccgacgtggtggggaaaccacaagacatcctcttagcgatcaggggtgacgagataaaacagttgcatggcaggaaagccactgcttcattgtctgtagtaactgatctcctcacattgcaacaagtgcgttgggtgcatgattacccaatttccgattacgtgcggattaggaacatcagtgaactcagtaatttcctaattacgcgggcgggtgcgaccagagatcacatcaacacctggatggacacaaatcaatggacggtgatggatgaactcaattcgactgacatcacaccacaagatggtgttccttcaatcgccctagtcaacggataccacatggaaggtgataagtgctgggtgccgttgctagaccgcattttcacggttgtcaaggaaggacatggtttcgcgcccacatctcagcaaaccagtgtacaactggaagacagcagattcatggctcacaaattcaacgagacacacgatgccacggacaccgtcggggtagtgaaagaaatcctcaacgtttcggccatgattccatctttcagtgatagtcaacaagcaccatacgccggtgaaccattcttcttgtctcaacacgaagcgagcaatcaagtcatagaagtagtggatattatggataacaatggcagtgtggaggttatgaaagttgatgatttaccatctgccaaaaccatggattactgggataacacagaactgatcgacccagtgataattttaccatcaaacccggatttcaaaataacaagccggatacaacctattcgcactaagatgagcagatatgtgaaaatggaggaatggccggaagtggcacgtcagagccgatctaaagcatttggagaggagctgaacagcgtatcaaagcgctatggtggttatattgattaccaaaccaccccactaaacatagaggatgaggttagtgcttttgtcaaaaattacttcgtcccacaattcagtagtctcagtaccatgtggatgagtaacccagtgcaagtatcaccagcaggagttaacaactggatacaagcgcactcaagtaaggatatggttttgaaatcactgaacaagctattggaagatggttggggtaaaactggcatcaactcccttgaagtgcacgggaaaaccgagcaaacaactaaaatggacgagatctcacgctggtacgacgatgtcacgacgcggagcatcgttgcagcaccatacgccatttcagccattttcagtcaagctttcatggaaatcaagtctaggtttaaactagcattactgcctaaagtgtgttacgtggatggtatgacccctcctgagatcgccgcaaaggtgcgcagcactggcggttttaaatgggcagtcgaagatgatctgagcaagcaagacagacaaacctcctgggacatactgaagattgaacaacgtctgtaccacctgttaggtatggatacagaattggttgatttttacatgcagtgccacaaagcatggaaatggaaaggacacggtatttctggagtttgggacgcaatgcgtctgactgggcaagtcaccacagcgctgggcaatgccatcacaaatttggttgtacacaaccgattttacaagcgcaacgcacactcggttaaattgatgatgatactaggtgatgataacataatactgtgtgataacatgttggatgtcagacaccatggaactgaagtgaaagagttctacaacatggttagcaaagtaaaacagaacgaaagagtcggcggtttcctatctatgttagtttacgacatagacggcgacgttggtctgtgtcctcatttttcaagaatgagacacagatactcactgtgtaattacacgtattctccaagggagatgtcagataaagtgcaaatgcggacactgtcttatgcttttacactcggcggaatcagtgaagtgcaggccatagccaagcgtataaacccaggggttaccctgcccaactggtatcacctgcaagcggccatagcagccaacaccatatatgataacacgtcagagtgggctaccagagcgaaactgggcaaactaatcgaaatgatgcagg

SEQ ID NO: 1214 - DNA, 14946 bp, chieh-qua endornavirus
  source 1..14946: mol_type = other DNA
atggagacatcccccattatgagttgtataccaagtacactgatagacgtttcgcgggagagacctccattttggaggtctctccttaagaaactaaaattaaagagcaaataccacaattataagtcaataaatagagtggtaaaaccatccatagttagaagagaattttctacaaaactacaagggtggataaagttgcctagaaattgtcaaatgacattaaataaaaacccgtttgagacaagtttcagaaaggtatttaaagaaaataaaaatttgatctttgataaaaataaaattaaattggtaccagccataagaggagtaaggaagttcagagacacaggtggttcaatcgctgcgaactttagatttgaagacccccttgccggagtaatcaactttgaagcattacatccactagatatagccaaagtttattacaatgtgataaatgatggatgcgagatttggaagcagccacacagaccaatatcagattatctaaaccttaccaagcatgagggaatagatgatgaggatgaagaagaggaaatgtttttggacagtaataatctcgacaacaatttaatcatcagggtagtcggaccaggaagaggtaattgtacatctgatatgttggaggtgttgagtaaattagttgcgagatttggaggttatgagaaatattacaatacgtatttggagacacaacacaaacatttcggatatttacagcgtggagatgatggaaaatattcattcgaaggagtgaagttcaatccattaaagaaatgttcagtctgtaagtacatgaatcattacgatgagttaattagaggtttgaggatggttcattttagtctgaaacattacaggccaaaatccaaagtagtaacagacgattttaaaactatttacaataaaggtgacataatagaagatgtaccttggagatgtggttattgttttgcagatctcaatttacaagttcacacccaagatgatcctcttcaaaccatagtacaatatgtagtagatcatctgtttgtattgatgggagatttagatcaactgttaaagatgggttacggggacatttatgacgacatagatatagctagtaaagagcggattaaatccactgacattgcaagagccaacgagtatttctaccatttgcaacgcaaaatcatacctgttggacaagattttgacatgtctcaagcaaaaactataactgatagcataggtggatgctttttcaaaatgcaaagtaagttgaatagtgtcaaaccagaatttatcgctgaactatctgcattaacagaaatcatcgaaaaatcatgctcaagtaaaccggtggccagtattggtcaaatattacccggaagtagtaaagaaaatgtgcataactggatgcacaactcaacatggtatcaaccggacccaggcgttaactgtagtaatgataagatatgtggccacaaacacaactacataatttatggaggacctggaatatacgctttgggtctatcgaatgtattggcactggttgatgaacaaagaagtttacagatcatcacccccatcaaaacaaatcaaaatgtgatggccgatggaactggagcattccaaaggactgatgagtatttaaacttttacatagatggaaactcaacaccattacgaatgaaacttgacacatacagtataattaatgactaccaagtattaaaattggatagcaagctatactacgtgttagaatcacaccggttaaaattaaccaaagttatgacaatagttggaccatttaaagagtcagtaccctaccctcaaaaattgatcaaacatgatacaggtataaaagtgacattacatctaccggacatacagagtttcatgggagaattcacaggattgaattatgtagaacaagagttcgaactaaacgtttcattattcaagtatctgtgcttgcgaaacaccactggtaaagttagtcacgacacattgagatcgtatgcggtagggttctcattgcgaagattcgtcgtacatagtaaagtgatctcaaatccaaccatagtgtatcaagacatagatattcacgttattttaagtagggtgtgtatgatgaaactaagaaattgttttgacattagttatgggtattctaaattcgcaaaactgttaggaccgttcagatgctggctgggagacgttgaaacagcaatgacatcatccttcctgggactcattaataaattaataacagacgctttaggtctggagtgggatgtggtgttgaaattcatagatgaaataagactgcaaacgatggttgatggcatatcttccaccaatttctgggaaaaattattgtcattggcagagaatataacaacagaggatgttaaaatagtggatttggatcaaggtgtcagtgtgttcgtgggaccaaacataggttcatgcaatcatcacggtgataagtgtcatcacatcgatacaaaaggtccaaatagatgtttatgttgtaatatgccaataacagaatatgagttttgtgagtgttgtacaccatccaaattatttccagggaatttctttgatatagaggaccgaattaagaaagaggaaactgaaggcatgcaactaactaaaagaaatcctaccagtgaaagagtgatgaaactcttgataggagaaatagaaaaattgtccgctacaaagactgaagaagttaaaagaagataccaaacagctactgaaaagattaaatcagggttacacactgtagtagagaaagttaggaaaacagtcgtaaaagaggaagggccaagtagtgctcaagaagttggcgtagagcaagaagacgaagttgcatcatcgatagagataccatccaatgccgaagggtggcaaagagtcacaagacggaacccaagagacccacagagtgcctccgataggatggtaacggatatgttagatcaattacaaccaatcaccataagtgcagatagtgctgaagcgatacagattttgggttatgattttgttcaacactgcctgaacactgtggaatatgaaaataagttaaatgatggaacaaaaaccttatacacattgccccacattccaatcggtgatatcataactcaaaatcaatcctttgaaatagtaagtaaaatcaccattcctaattcagatgctatgacatgtgcttttgatgcttacaagtatgggtatccaacagctaacttagaagaaatgatagcactaaatggaggaccacccccactagataatcacgtaataatggattatgcatctgcaagaagtgaaaatataatcatattcggtagtacgggaagtgtctggatggcaaggcatagtttaacgtcaaacgatttccattgtatatggtttgacgaaccagagttggatgggattggacatttcatgcctgctataattagaagaatcggaactcaacccacttgctttgttcacacattacctgcgagtcgagatgaaagaacccaactaatcacattacagtatggtagagagtggtcaatcaccaacccgcctccaaactttgatggaaaggagaatctattaatagaattgacattttataacttacacacggatgtgtcaacaaatacttcaacgaatttgctgcaagtagtcaaatcaggagaagaggtaatcttgacaaacaacaaagaatctagggtgcatgccactaacagagaaaggattcatgtgagtttgccttcattcttaaccaaatatgcagacagtttgtcactagcattaaaatttgacctgacgaacgaagccatagatccaatgagacatatctctgatgaactaccaagtaattacgattatgaggtcgaagaagaatttaaagagattttacgcacatttatacgagtgcgtaatttaaaggctggtttggatgcaagagacataaagtttgcctacaaaggaaaattgacaagttggtacggtaaaagtaaattcttaatgccaactagcgagtcacacaaacttaaaagatatgatgcagtggcaattaaattagacaacaagatagaactagcttatgtattaggtttagaagggaataatgtaatcttggacaagacgatgattacagctagggaagtgacaatgtatgagattaaggaatccactggtagtaaattaagactactagtgggcctatgtcaaccaagattaaatatgcaacaacttaaagacaagttagctaaagctcaatatgtcacaggaccagctggtttcggaaagtcaaccatgatagcgaatgaagccaaaaagggggacttatgtgttgcaatgacgtcaactgcagtgttatccttgagagataaatgtaaaccagatgtcactgtgataagtttggaacgagcaatatatgaccattgtaaaacaaacaacaccttattcatagatgaagccactatggtgaattggatacaccttggttatttgtgtggaccagatgggaatataaaactctacggcgcggaccatcagataggtaagaaagatatgagtgctacaccaggagtgaggtataacataacaatcaagagtttcctaagtcctaaaaatattaaacgagagacgcattcttataggataggagaaccaatgatccagttgttacaaccagtagaaccaggaatgaccacacgggccaaacacaaaactacatacaacattacaacactagatgattgtgaattcgaaaatattaagaccatagtgactagattaaacccagacatcataatcaccccttattctcacaacagaaataaaattcaatcaaatctaggaactctgcctaataaagtagtgacaactcattcattccaagggatggaggtgaacaccgcattagtggtgttgagagatgactcaaatagagctagagagttgaatggtaaccccgaatacttgaattcagcgctaactagggctaagtaccatacagaattggtaatatatggaaattacggaaccataactgacttgacaccactggtacgcagattaggaggaatgaggataccaactcttcccacaacaaagatcaaagtctcagcctcaaaacaaagcacagaattagaaatagatcaaacaaccggtctgccgaaaactattaatatcagatccatgcatttattaactagtgacatggtagacaccctaaacacaatgggcataaacaatagtggagtagcattaacatacgaaaaagttgagagaggaactagagtaactgcaaaacttgggaatagtgttgtaagcacagtcactaataaggaaggggaaatagacgtgcaagcgaatgcatttatcaagagaaagatcatgaacaacctagacacgaatatagagataccctcaacacctgagcttgataaattaacttttacagacgagaaaatggttacagttaattttagattaactaacaaattaagagagctagcttggatcatagataagggcaccgaaaataacatgcaattcaagataggaaaacatattataaaaatcacaaaagatagtggttgtcctctattttcaggagcaacatttgaatgtgacgaagagaagttaagaatatcgaatggatggtatagtttatttgacaggaaagtattcttcgattccaaaacaacatacgtcaaattgagtccaatactaacatggttagatttacaagtaccagagttgttttacaagaccagtagtgatatagattggttagatgtactaaaaggagacatggtacatgctttatggcagttccaagagcgtttaactcaaattcatctatggtttttgaattatctaacaggcgatcccagtccaaaatgttactttaacaatgttaaaaatgtggctagatacaataaattaatgaggtccatgggttctgaaccaatcacaagccaccaatcagtggtttaccatgaaaacttcattatgaaatctgtcacaaggtggaggagagccaccaaatacacgcttggtagcgcagaccagataatagctgaggtgagcacaagggacgctgggtgtgtatggagaatgtttgctgttgaaagtctagctgacatgcgacattcatatccaaaatgcaaaggaataggaggaacagattttgacataccaggactactaattccgctacacaaacatatggctaaaaatactgccgtacatcaattagttagtagtaatctagcgaaactgaaagaacaaattcaaccccacatgcatgacttgataaggatggacaaacaaggtttgaagttaattggaaattacatgtcccaaaaatatccaaaaatgactctaaccactggcagttatgaattaattaattcaccaatagagatagcaatggagcagattatgttaaacatgatgggaagtttaacaaaggatacaccgcggcttgtggcttatagtggatatgtcccattgacagtagcaatgttgggaaaatattatatcaaattagtgatacctgaattagaagaatatggaaggttttactacgatattagtaaacctcaattggattcaatgatagcacattttaatagtatcagagacaagaaagtagatttctacaccagcagaactactaacttagaaagattattgatgggtacacgattgacatcattatcacccaaagaggtagatattgcgttaaacaactgtaaaactgtatacgggtggttaccaatgttcaaaaagagcacagacaattatggctttgaccataaatccaacctaatttatttcaaacatggaaaggtatctaatccaataaactcatccatgttggatggaagtcttagtggaaagccaataatagtaaataataaagataactattatttagaaatgtcaactatgactgaagcatttgatcacaggttagtacaaataacacgcaaagaaatcccaatagagagatatattgaccgtaggatagggagttattcagagatgaataacataattaaaataaaagtaccctggatcgacttagacctcctcagggtgatgtccgatcgtcaaatagtaactataaaggaactgacaatcaataagaaattgctacgaaatatactacttagattgatgacaggggaagattcacatgatgatgcactgtcttatgcaaggactctagaatccacacaagtgataacagaaggaggcattgatgacatgagttcaaccaatatgttaacaacattaaacaccacctggtatgccatatatattcataatgattacttaaagaagtttaaaatgttaatatcagccttgaacagtaccagagggcatccgttggcagtaggattgttagaacaattaataactggattcagcaaatttttgggaatgataggtgaagtagcacaaggtctatgtgaaacactaataacaaaattaaataaagatttcaatttaacaaacaggatggccgattgtatagatgaagctcaaaagacaaattggatgccagatgttaaaaacgtgtatttcaacaggttctattttacgaaagaaggttcaaacgatgtgacttcatggtttgaatcaaaaccagatgacaagccagatgatgataaacgtaaaccataccaacaggatgatgctagtgaggaggaaaatagttatttcaacacccaaaaattatcaagattcaggcaaatactagcgacagacaaaccaagaactttctcacatccacaacttgacgagtccgtattacaggaaaaagcggaagaagaaggagatctaactgattatgaagatgttgaagtcacagaacccaccagtttaccagaagtaagtgatgatgatgaagagcaaactgaaatttactgtgaaataagtatagaaaatttgctattgatggaacaggaaataccaactatacaccaacgacgggaactacaaagaaacattagaaaattgagtgcgcacaaaagattaaaccaagatgaaattgggaaaataatctgcaaaaccaaagaattaatcaatattggccaaacaccagagcacgtactcgctggggatcttgtagatatgggaatcttaacagaaaaagagaaaaacactaaaaagcacaaggttatagaccacgatgcaatcactgtcccaatacacacaggaataacaaaacccaaactgaaatctatatttaacaagtggcatatgataccgaagattatttggacttattggcactcaaacactatgagtaagttggtaggtcagtgcgtcaaatcagtacaagtggcaaacccagattatgaagtgattcttctcacagaagaaaatctatccagattcatggatgtaagcgaaatgaacaatattaaacacttgaaacatgagaatcgggctgattggattcggctacaagtgttgatcacttatggtggtgtatgggtcgacgcgacctcaatcggaatcgataatttcgatgagttgttagaaatgacggctttatcggcttcgggagtaacacaagtaagtttctcagaaaaagatgaattcgtcaaattatttgaaaattggatgataatttctacacctcaaaatccattactgcatatgtggttatcccacttaaagacattgctgcgattaaatttcaaacatctagacgctctagatgaatatatgaacgacaactatgagagatatgacaaatataagaaacgtttaggacccgagagccgcttatatttgttatcatatttgatagaaatggttataattggtatgacaagaatggagccaaatgcaatattagccgatgatagattagttgatgtacaccacgaagtgaaatggcaagagtggaatcaaattccatcaatctacttcttcaaaaatgagaggcaatttaaggtgccaataattaaaataatcagcactcataaacacataatagagtattgcagaagtatcggatttgcagctcacaaagattcgtggatgtaccaactagagagaatgggtcatagtccaattatagtagaccatgaaggatatgtagaatgcctacatgatttagtagagaaattttacccgacaatcggaggtagccgtcaaggtattagaccacgagctgatttacaagttgcaattcaaaacaagttaattaaagtggtggacaattacacggaaatatccttgaacccaggactggaggaaataatatcaatcatattttcatgtggactcactttcgtaaaacctcgaaaagaattccagaaatgtttaagagtgctaacagaaaaattaaccaatgagacattcggattgacaacagtggtagacattgtacaagatgtctttaaaatcacattacgtgaattctttagaccattgatcaacaacatggttcctattaataggacaatgcaaagcccaccaaatacagaatatatagtggtcggggataaacgaatgccgaagattatttggtcttactgggatgaaacaatagttaacagattccaggttgacatgatagataattggcattaccacaaccaagattatagaataatcatattaaacaagacgattttgtcgagacaattgagtaaacaaacttacgaattgataatggcacaaacccctcagtaccgatcagattgggtaagactgcacatattaagtaaactgggtggtgtatgggtggacagcactggtatcttccaagatacaatacacccattagtaatgcagactttacaacacgaatcaggtgtgtaccaggtgagtatacagtcacggactaaatcaccacgctactacgaaagttggttcataattgcttcagaaaggaatgtgtttatgaaccattggtttgagaacttcaaaaacatgacaaatcatgtcaaaccaagtggaagtaacgccctagattggatggagaagaattttgggcaatattatcatgatgcaaagaatttgatagtaccaaacttgagggtctatttgagagtgtgtttggtaggggcgataacatcgctgcaactgaaaattgaaccattatcattatgtgttaatgaagggagactaactatgttccatgatttgccaaaatcaaagtggttaaatctatggggcttactgacggaagaaccggcagtagagtgtaatgtcacatttccatttataaagtggatagggatgcaaagaaacataatatttagaaaatacaaaccggatttcattccaaaaccggatagtttgttaggtcaacagatgtttaaaataacaattccatatgatgtgacaaatagtggtggattgagttatcctggggaggcagttaaaagagagagagaaccaaggataaccatttctcaataccatcaagcaaacatactaatcttgtgcataggtagcgcgggagacataatccaatttttaacaatttatgatttgttagaatctattggtaaatgtccagtgattgtcacacataatgaccatgataatctggtgcaaaacagacgtcaccacttcttaaatgtaactgctaaatctataatggaaacaattgattctaaactaacacgcatagaaataggagcggacatcaaaagttatcaacaaatgcaagaaatcacaaaggaactggacgtgttaacaaccaattacagaaataacatacaattcttgattattaacagcgcaataccaaacttgagttgtttctccgaagaagtaggacataaaatcatagaaatttcaaccttcccaaccgaatggatgtttggggacactactagtgaggacacaccaggaattggattgaaattaaagaaatgggtatttaaaaatttaaatgatagaaaaattatgattaaagagcctagaaggtatacatattacaattcttgtagtcaattattatatcctgaaggagaaaactttataggtcctctaaccatttggagtcacaaagtgaatagtgatcagataaacttaaaagacaatgaaatattcataacatttggtagttgtgataaagctatcagtgaggaatccaagttgcacttgtttaagaacctcgtgtcaatcggctacaagttgttgtatcacgacccgtatagaatttatgtagtgggaaccaagtttttcaatgaggtaaacgaaatgcggggcaaaattagagtgattgagtcgtttgacctacgaaagataacaggaaatgacaaaaccatgataaaccatggaggacatggcactgttatcgaaagtctgttggcgggattcaaactaattatacatcctgtgatcgcagatcagttccactgggcgaaaagattgaaagaattaaaactagctactatgttaaccgatatagaaagtttggaaaactgcaaagacgcggtcacagaactaaacaggttagttgatttcaacgaaaaattgggagcgtttttgacaattaacacgataccatttttaaaccagatagataaaaagtacttggcttataatccagggcacagtttgaaagcgctaggatctatttgttttgtagaacagaagttgaaattagtaagaggtgtttacaggatttcaaaagttatgtattctgtgaagttcaatccacaagtagcggaccattgcgtcttagagagcaccctttatcaactttctccttatggattagaggagttttataggttcaacaatctaagtgctaataaattgaaggagcctgctgttacagaacaagatctaataaatggtgtactcagtttaggaataaatttggcgattatttacaataacggcacaggtattgtttatcgtatattcccaggggagtatttaatataccatatagatcgtagcagaattccttggcatgtaggggtaccagaagtggcaggatatgagatgggtgatcagatagataatttagctccacctgtcaaaaacttgcctgaagacgtgaaaacggaaagagacaaattgttattagatcataccacgatagaactaaccaatcccagggtgttggcattaaaaatggggaagaaatattttaagaacttaatggccaggatgcaaggattcaatttatgtgaaatgggcaacagatcagacattcattgtttgaaattagatttacgaaggcatggttttacccacgtaggtgattgcaaaggacccgatcacccattaacggttgggtgtattacatccaaccaaggttggatgctagtaaattggcaagttaaaaacaatcaaataataatttatggtgagcaaggaatatattcaacttcaatcttggtaaacttacatatgcaaatgcaattaaagtcagatgttaaaaccatacttcaaccacggttggaactagttagtttaaataaggcaactaagcaacacaccataatgaacaacttagtgccaagaagtagtgtgatttacaatagccacatgaaaacctataaattagttgtgagcgactatgacaatagagatcatcacatgttcgatgagctgacggtcatacagggagcgacggaggtttattttcatagcaataggagagttacggtcaaagaatttgaagaaagtcataacaaaggattgaatagattggtgttaagacaaggtctattaggatacgagcattactttgatgacgtttatcgggggagattaattctaaatgtcgcgcctactcaacacgaagacaaaggtaaattccatacagatctgaagttgacgaaagataaaatggaatttgtaaattattacttttatgccgaacgaggaatcatgttcgccagagatgattggagaataaacggaatagaaatattggagtcaagaagggtgactgacatcataaatacgtcggtcattctaacagagggtgaaaaattaaacttgaatgcagtaatttctaagcatcgtacgtgggaggtagcaaggatgaccgacatggaattcaaaatcaccccaatcacccacatctttgttgatccgacaggtgtaatacatctacaaagttacatgactctgcttcgaccacccaaacaaggtggaaatgacaatctagaaagacagtggtggaagatgacacatgagaagccaaatttaagcaaacccgttccaggagactggtggggattacgtgaaaaatcaattgtgaaaccagttaacaagtttttggatgtcatggctatgaacgagttgcattaccatgatccaacgactctgaacctcaatttacaagtagtggacgaagagccaactccgatggacatatatatagctccatacgaagctgtgtatcctggaagtttgttagaaccattgaccgattttccagataacattgccatgcaattgtgggaagacacagatttgacaaactggttatcgttatacgcaccattaaactcttgcgtaatcaaatcacgagagttacccgggcaaataataaaatcggagaaattaactatgaataaataccccatacggtctcgggcagtgctcactaaagtgtgcttcgaagaaggtagaagtataataggtagaatgaagtcagtggccttcataagaacaaaaaccccaaacccttacaggttagttttgaatatagcagacacttacttccgtagagattggcaacaattaatttcaaatttcagaaatgacctgttaatcatcagaccaaaagatgttcaaaaatgggtttccgagaacaaagattcccaaagaatagaaaaagagttaatagaattattgtgtggggagttaatttctaaacccattaatgatgtgaatgtgcatctaaaactggagagtttgttaaaagagaatacaaccatcatgacaattcaacaacaagctcgaataattgtgtggcaacgtaaagcagtgtgtgctatttattcgaatctattcgtagaggtgaaacgcagattaaaagaaatattacacagaaagatagtttatgctgacggactacgaccagacgaattgtcagccagagttaggttggctaaaaacgtggtaggattctttgaaaatgatctaaccaagcaggacagacaaacagacaaaccaattatagaagtggaaatgatgttgtacgatctattaggggtacacccaaatgtcatagcatcttggaaggaaatgcacgaagtttggcgcttcaaatccaatttatactggggagaaggtgaaggcatgagacttacagggcaagccactactgcccttggcaattgtatcactaacttacaagtacatcaacagttcacacacaataatttctctatactgcaacttggtttgttccttggagatgatatgtgtatggtgttttctgaaaaaccggataccaccaatttaagaaaggacatcgcaacagaattcaatatgcaaagtaaagactcatggatgatcaatggtgccacattttgtagcatggtaatgtgtcgaacactgtctggggcagaattagccccagatgtcgtgagattgaaattcagatatgaagtacccaatggggtacacgaagctacagctaacaatctgttaatgagaaaagcgtcctatttaatgatgttaggaaaaggacctcacgttaacgacacgattaaagctctaaatttgccaataaaaccaatatcttggtataatttcgattccatggtgacagccgtgggacacaaatacaacatgtcagatgatcaagtgagaggttattatgacgaattaatacgcatgataagaagtgatcaagtgtactctcatgtattcagacatttttccaacaaatag

SEQ ID NO: 1215 - DNA, 12624 bp, Cluster bean endornavirus 1
  source 1..12624: mol_type = other DNA
atggtagtttgctgcaccccaatacagttcgtgtttgatgatcctttgttgtccagcgcgttgcaaccagatttcattgccacttggtggctggccaaggaacaagggatgcaaaattatggattaacccctgaacaattcaagccctttgtggacacggctggtttaagtgtggaagatccagctaacaacttgacacacaagtactattatgaacataagaaagacggtgttgagtgtgtttctgtggacgaaggaggccaattgggattaatggaatcagccctaaacaagattattgcaaagtacggcgggttgaaaggtatgcagcataaatgtatgttagctagctggactaaagtgccagtattggcaaagttaaacaacaaaatcgttccattttgtgtggacaatgagaccatcggccacaggttgtgctgcaactgccacaccatgaatttatattggatgccaggagagaatgggttagatgatgcttggtgtggctgctgcggggcagatttgaactacatgatggtgacagaggcacccaccccgggcgagaaatctaatgacactggtgagcacatcaataatggaatgggggctgaccagttagaacaactgcagcagttgaagtacttggatggtgcagagttagatggcaaggtgcgagaaaaagcaattgagcacgacgctcgaatcatgcgatcgatgatatcacgaactacggggactgtgatcaaattagagccagggatgaccgaatctcaaactggagttctgaagtcgacattcaaccaatatgtgattgtggtgggccaaggcccacccaatccacatgcaatgttggccaacgaacgaaggtgcatatttagacttttattggacctcagcggcacaaatagaccccacgtagatattggtggagccagactcggaccaaccactgatcaatacagatgcatggcacccattatgggatggagggatgtagaaagagcctcagcaaaagtggtgcaaggggacgattgctgtcacagactagccaattgttactgtgatgtggacaagcaaccatcactgatatctgtcgattcactatatgacattgatcctttggagctcaaagagtacatgctgaggagtggatcagacacaatattctactgtttaagcacagccagcgtccctgaagacgccaacaatggagactttttattcgagcaaggtaagtggtccgttcacgaatccaaattgataagttgttatcacggagaaaatctaccatatgttaatgattacagaacatccatgatgtggacacacagtgatgtcattgtgatgggtgaatacagctttgggtgttcaacgatcgaaacagttgggaatcacgtgatcagaatggcacggctgactcgcaatggacccaaaagtttgggttacactaaacgtgtggttgaatacgatgtggtgaaatctattgatgtgccagtcataaatagtgagtcactcaaaaacatattgagccccagtttgttaaccaaacgaaccatcaaagtggatgccaggttgctcaaaatgttaatagtaagagatttaacaaacagctgcacgtatgaagatatggtcacatatgcaatagggatagcgcacagtaaatatcagctagcatccagaatgatatcaaataattacatcacagctgatatggcattagatcatgcgttattggcgaccataataagcaggagagccacatcttacactaacagattaattcggcagacacaattggtaaatcaacctatgcacactattaggacttccagttggtcagatctgtggcaaattctgtttgggtgttttgtggatcaagcaattatgggcattgatgaagcccaaaaccgggtgcacggacaggttatgagcaaagttatgcatttaattgaagaatggatgcatagtgtgaattgggatgatttgctaaacttttctttgcaattcggatggaaagacctgaaggtggtgacgtgcaaagagtcatacagcgagccagattcagtgcaaacctgcacgcaccactcacaaaattgtttgcatgatgaaattaatggcaacaaattatgtgcatgctgtttgctaataagggtggctatgggtgagtcaaaatgcgaatgttgtaaaccaagtaggtgcacccatgcttgctctcacttgtgtgatggtctagacacacatcacacatctaaggggggaaaaaccaaggtgtgtgaatgctgcaaagtggaacattttggtagcaaatgtggggtgtgccaagagtttgttcacgagaaaacggtcaacattccagtaatcattgagcatagcacgcgcgaccaaccaaggaaggaatggtcagaaaagcggtacgtgaaagcaaaattagttccggacgcagtgaaattgctgccagggaaaactgacaaacaagaggtgacaccgttggtggacattaacaagatgatcgaacagaccatgcaggaacggaatgcaacgccaatgccttctagcaaggccacggtggagatgttagctgccttaacctccgctgtgcacgccaatctattcagtgaggacaacccatgggtgttgacagagccaggagattcacacattactggtttcccaggctggagtgaaataaaatttgtgggcatgggaatgactgtcatggacaagtctgattttgaagtagtggaagtcacgaaagcaagtggggaaggtttgttgtgtggcaggaactgtctgcaaatattattgggcacagtggacaatgatgcattgcaacgtttgagtggagttaaaaacaattactctaatttggacctcatgaactacctcacaatgctaaacaaaaattgttgtattctaatggagaactcagctgtggtaaatagggtggatgttggcagtgacgaatttgcctgcatagttcactcttcatggtttggcaacgagatcggccattgggatgtgtgcaacatcagacacaaatcatgcctcagttacgtgccgctattctatccttggatgactagtcaggatgtactgacagcaattgatgtgaacgtgtatggtggcacagatattcacaacctggacgcacagagtaggctggaaattgcatgcatgatatatgaatcctatgtgggggctaattcaaagtacggtctcaagataagcgcgccacgcgtggataaggtaggtaatgagtatctaatcactaacaacaacaaaaacctacacgaaccgggtaaatatttgttcacattcaaagtgcctgaggaatatgttgctttgatcactgaaagtttgaaacccaccatgtccattaaagcgtccaagttgttccgtgatgcttttgatcgcaaacgtccaaccaatgcattggagatgaaatcactaatggatgattggttgaaacaacgcctgcgaaacatatccagcagtttattgagtatgcaaggtgaggaaggtgtggaccggcaagagaacgaggtacttgttaaagtgtacagacataacggggtcaattatgtggatagaattgggcagttggccaagttgaaaacatctgatgtgtgcttgataacttctgggaacgtgaaagaatggtgtgtgatggaaatggcagggaacaagctaatcatgcattgtaacagggtgttcaagtcaggggctaaaatccatttagtggtgcccaaaataagcgtgtgctcggaaatcatggggttaatggctttgttttcaggccagttgcaatgggaaaaactgatatccctgttgaagaatggttcatgcgtgctgggtccagcaggaagcggaaagacagaaaggctgttacaaatggcaggcagcaaagtgacaattttgactaaaactttcagtgccagagaggaaatcaagtccagactgcaagttaaaaccccagtgttatcaatggagaaggcaactatcaagaaggtagacagcgaaatagtgctaattgatgaagcaaccatggtgtcgatagaggaactggctttagccatcacagatcgcgtgcaaaagttgtatctgtttggagacgaattccaagtgggaatgatagacacggatcaacatcacggagtgagagaggtgtttagtgtggcatctatggttgacaatgtagaaagactagaggtcacttaccgctttggcgaagatgtttgcaaggtgctgcgcaatttgggtcaaaaggttacgtcggcgagcaagcacaacacaatcattgaactggtggatatgcctgacatcgatattgaaagattgaatagtatcaggaaaagagtcaacccggatgtggtattgtgcttctacaccagaacaaaacagattctggaaggaagaatgggtgccacccctgtgttcaaagttcacgagtttcaatcaaaatcggccaatgccgtgatggtagtgcagcataaccccgcgtcaaagtcaggaggtatatggcaggatcccaagtattgcatttcagcagtcaccagatgcaagaccaagcttatctgggtgtcggtagacatgccaccaggcaaaccattgcatgtgcggtgtggtgggatggggccagtgggcaatactggtgggcttcaacaagtactgtcaacaatgttccgacggtcgtctgcctcattgagccgccacaatggcgatgaaccgtttgtggttgaatcagctaagcagcatggagctgagggacgaagaagttgggcagagatggtggaagaggatgatcaaggcgcagatattcaccagctgttacaaggaggtggtgatcatgttgatttaattagtggcgctttttcgtatgacgcacagatggcaaattacaatgaacgcccattcatcatcaccagtcaatccaacgtgatgaagctgatcaagcggtacctggatgaaggcacatcaacatacaagtgtggtggagttaagatttggagtaactgcaagagtcaccctatcagcatttcagccgtgctcatacgaggcgacacagtggttgtattaagtgacgaggcaaaagcaatcatcaacaaagttattgacgagttgggagtaccaaggacaatgaaagcttttcagagtcatggtaacaaaaacacttttaaggagcatgtatcgaagaccatagctcttgctgcgagtcaacgcaaacaagagcgaacactaattaaattgatcaccgatgaaattgtgaattgtgaggagagcattaaattgaaaaaggtgcagctgccagtaggatggaatatttcatccatggaatccaggattcagcgagagttgccaccagggttgaccacgaagacgaacggcaatgaaatcattgtcaggggtatgttcgggatcaaacagtggactttacgagtggaagatggtgaactcaagtggtctgacgcagacattgccatgatgctgtggaagtacagacccgaattaatcatggaattgatgatgtacaggctcgctagcagtattgaccatatagccaactcaatcatgactgccgaagacctcaaccaggcagaaaagtctgtggatctattgcaagagcatccaacattcgagcgagccttggtgcttcatgatgatgatccacgaaaattgcaaatagcactgactatggatgccattcaccaaggctgtttgctacctggaagtataaatgtgacagattggttgatccccgtgagggaggagtttgatgatgcatattttgatgtgcatgtaacagatagaatggaagaaacagtaatcagcatcattaggcccggctgcaacttagccacaatatacacgaactttctaagaaatgcagtatatgtggcaggtgggttgatcaagcaaaagttgatcgcatcattcaaatgccggacgttgcaactgtgggaagacgtgataaagcaaaaccaatttgacgtagtgtttaacgaggaccttatgtcggggttggaatatttgaaatggaaagaaagaacagtagatatggccatgcccacattgaaccagactctaatgcaggatgatcacagcgtcttgaaattaccaaagtcaatcaatttaacaaacgaatcacgcccgtatgattttaataaacaacacactgaaaagccaagagcaccaatagatatcaccactgacaattgtttgtgtgggtccaaactgggcatcaagatttccgatgttgacttgaatgtttggaaactatcacagtgttccggattagcattgatgcgaatccctaaagtggctctgttagttcagcacgtacgaattggaggaggcgtgtttgagtggaacacgccgtatggaatggtggcattgacaacgttcggcggttgtgctttatgctgtggcgtgattgtggaattcaatggggaggtggtattagtgatggacaggttgcagtgcacgaagccccgtcattacgtgatcagaaaggaattcttagaagttgattcaatgctggctgactgtttactacacaggttcagtttgatagagccgaattgtgtcaattttcaggccaccaacatacgtcaaatgtcgcatgccatgttgtatttgcccgatccagtggattcactgactttggttagtatggtgacagagaggttgaacgcaataggccgatacacttacaaaaggtttagacatctagagtggcgccacacagcaggggtattcaagaaggataatgaggtgaccatccacttgctacagagcaagctgggtgatgagtacaaactggtggacaacgtcaagattgatagatgcatgagactgtggcccagtccagttaggtttcaacacaggtctggagccctcgttaatgtctgttacactgggagcgagtggtggactgatgacctggtgttggctaataaatttggaattacgcccatgagttatactgagttaatagacaggtcttttgatgaacggttaaaatcgcatggttacaatcacctattagaattcaatagcagaaaacaaccgatgggggccaatgaaatattgaattacagcttggattaccacaaagcaaacaaaaccaaggtgagtgcaattctttctgaaaagatggaagccgctctgtctgcgcaactcaagacattgggtaaaactatatttgtgtctgaaaaacaatatgctgaatacggagcactcttgaaggcggacctcccgaattgcagtgtgagcacacatggcacctgggtggctagtggtggctttgatcaactggtagaaatggtagggattaagtacagttacatgaaatttcctgatggtgaaccgatattgtatcttggtgaccatcccgaaaatgtgttaattagttctagttgggctatgcacaccgattttctgacgagtcacaacaatgtctatcatttaggtatcagcagttgtaaccaaataatggataagttgtggcatatttacagtaaagctgcagaacgagccagtcaagacccaacttatgaaatgtccagcactgacttaaaggtgtggcacaacgctcaaaaatacaaacaaacaggaagttgccaatgggtcaacagctccctcgaacgcacaaaggtgaaggcaagagtgctttggatgggaatgtcatggatgacattaagcacccaacaaataggggaagaaatcaaacggcggggggcctcaacctgttgtttgttgctacctagccaagaccatagcggaatgtacccatttaacattaataaattcggaaacagctggatggcggcatacaaaggaaacaattggcccattgacataaaccaggacacgtggaatgtaattagcacaaaaccaatctacaggtttggagacgcacgtatggtggtgcatcacgaaggtatggtgttggggcacgtcaaggtacgattgactgtgttgccagaccagttgagaggacctgattatcaatgtaggatgcaatcccttatggcaaatcaaaaggttgtgttctctattccaaacataggagccaagcgagaactaggtcgtaaacagcaaacaagattgattgaggtggaccaaaacttttacaggtatctatccttaaaggtaaagctgccaggctgcaaattctctgacttgttgccatatgccaggacctacatccaaaccacattgtacacacatcttggagtgaacgacaggttgaacaacttggtgagttactgccacgaagtatgtgcttgtgtgtatcttgagcacatagggaaaactaatgacgtttatgagaccatgcgtcagatggaaaaattctggggtctacaaagtgcggactacaaagagtggagcaaagcgtacctatggtccaaaatcagtgaatttgcctcattaatagacccagttggaatactgtcacagttattcaacacaaacaaaatacgtgaggccgaagagttgttctttgaggcactaaaagaaattcggcaatttagtgcacacagagtgtacccagagttcaaaatcaccaagataacatgcgagccgggtcacagtgacggtgatggtgccaatgacccaccccaaggagatgatggcccgccagcagatgacagcaagtcccgaaggcaattcggggatgcgggggccaaagcaagtgagttcactgaatattataataccataatggaagtcactaaaatgattacggattactttggcaacacttcgtcgactgttgacgacgttggtgaaaacattgccagcgatgataattatcaacccgttgcaggcagcaatgaatcgttactgagtgctaatgatgatgtcaatgaaacggtgctagacaatgagttggaattgccaatcgcagaatcaattcgagaagaggaagagcttcaattaccacaacacgatgatagtgagggtgttctgagaaaaatcgatgcacacacgatcaaacattctgtgtttgtgtcaccaagtgacagttatgacaagccaattgatgaagttaaccaagcgggattattgaccggggatgccgcaaagtcaattgagaatttaaacatgaccattcatacacaacaggcatttacagaagacaaacaactgacacaaagtgagcaaaattcggcaagtgtcattgtgagcctaatcgatgaatgtttgggcgccgcttccactattgtgccattgagatacggtgatggcatgttacagctggatgacacatatgaagtcccaacagataagatacagtacaaaaagtattacgcgtatgatgccaaacatgttactgagtttaatcccagtgcacagggagactgtgtgatgttgtgcttggaacattgggcaggagccaacaacaagcagatacgtggcactagtgtggtaccgactaggaactggctgaatgaagaccaagttgtaatgatagctttgtttaacaacgtcaatgtttcgatcacgtacaaaaggaaaactgttttgcacaagtttagtgacaaatgggatactgtgaatatccatcacgtggtcctgagaaatcggctacatcattgtgagttgataaaatttttaaatgttaactatgaacaggcaacatcgggtcaatacagactgacgggaaagaatgttaatgatatcgttaatttgttaaaaagttgtggtgacgccaacgacttgccagtagataaggtgatgaaccaccttagttgtattgccactggtacgcttagatctatggattggttcattaaccatatcaatgaagcagacgggtggggaggactaacgtcaatattggaattgtccaaccagttaacagccgccaagaggaagcaagtacccatgctaacatgtgacgtgcaagttggggagaatgtggtggcattgagaatggatgataggaccattgccgttggtgactgtttggcattatctaacggaaccagttggtacatgagttgtgtgttgtgccaccagagaaattggctaatatgtagtaacccagcacccgcagagcgaaattggttgcctgtttgcgtgcatatgcaatacaagtggctcagtcagaggacgcaaaaccgagtcatagtgcatccggggatcgatttaaataaatgtacatgcttaaacaacgacactaagagaatggtggctcaatggtctacttgcccgcccaacatgagtgtggggcgaaccggggcagaaaatttgttgataggacattatgataacatatctcatcacaagtatgacgaccgacacatcctggagaaatacgatccatcacaatgggtcggagttggttttggttttgatagtaatttggtttccgctttgttggacagaagcacatattacagaacgtgcatcgtgggtggcagcgtgcgtgtggcaatcaaattcgaagaagtaagattgggcagcattgtaaaacactgggtgacgagtatgatggcagaatgtgtcagggttggcaatgagatacgaatgagtaagaccgagtggctcagagttaaacccaaagtgtgcgtggccatagagaagtgcatgcaagtggacggacaaattgtgacttgtaagaagattaaagattgtgatttccattgctccaacatggaagaattcagtagtgtggtcggtatggaggtgacagacaactcaatgaagctgttagaacaattgttccctgccaccgtgcaatggaggtcagtaaaatctgtcattgacgtgccagatgtgaacagacacattacaaacagtgtagtcagattggggcataatagattctatttgagcgactcgttgtccactatcaccattatgaaaacaatgaaaggtggaagctgggttgacgtaacggaaactacgacgtacaatgaagatgatcgttggtggggaaccgcaacaggtgtggtggacaaagaatcccaggttagggctattttgggtaacttggtggttgaaccattgtctgatgcagaagtacacacattaacgcaccctgtgcaatgtgggacagatgtggaaagggctctgatcagttgggcagatgagattgattgggatagcagttatgtgcccggaaatgtttacacaggtgtgactccatccgaagtgatagatttgtggactgtccatgacatgagtggttacatcaccaaatacgcccctacatcggagatgtccatagtgtgcaaaactgtagtagctaagttgatgaccactactaaagtgacactgagtcaataccccgagcatgccaggcctgtcttcacaaagaaagagaaccaggagttcaatgccatatcaggtagattgggcaaggaggtggtgtatcgaacagagaagttggacccaatccaagaagccaaccacattgccaacacattcttcaggccagattggaaacaattaagcttggggtttagggcgaaccaagttacctactctacagaagacacaattcaatggttgaaaactagacctgatgcttgcaagatcacgcaagagctgatgcagatattgcaagaagggttggttacacacccaatgaataaaatgaaagtgcatctcaaattggagtcactactcaaagatgagccagtcacggatcaccggcagacaaaagcaaggattttagtgtggcaaatgaaaggactatgcgcaatcttttcgcctgttttcaaggaagccaagcagcgactcaaatccgtgttgggcgttaaaaccctgtacgcggatggcctacggccagatcaattggctagtagagtggcacaagtcccaacaaccagctatttgattgaaaatgacatgcaacagcaggacagacaaacggatgagactttactgaacatcgaaatgcagttgtacttgatcctaggtgtggaccaggctttggttggtttgtggcgttcttgtcatgacaactggtattttaggggtaaatcatgttctggttacaaacacgccatgcgactaaccgggcaagctacgacagcgctaggaaatgctatcaccaatttggcagtgcattggaggatctgtcaaagcttaggacgagattggaagtggttttgtgtgttaggagatgacggaatattgatgagtgacaggaaattggatgcagaggacctaaagacatatgggaagaagtactgtaacatgattttgaagcctaaagtgtcaaaaaatagtgcaacattttgttgcttcacgatttatcggactagaagaggcaactttgcactagggcccgacccaatacggttgaaacggaggttcgaggtgacgaacggcgtcagccagatgaccaaacaaaacgttgaggcccgtacgatgtcttattgcatgatgttaggagacataaaagagacatccaacgttattaacaagctgtcattgccaatcaaaccagtcaagtggtacgacgttcaggagtgttttaaagcgagcgatgaaaagcacggtgagtacatgggttgcagcgaagattgtgtgtcccagttgtgtaacatgatgattaacccagttttatatgagtacaccatgactcactggagtgagtcacagtga

SEQ ID NO: 1216 - DNA, 14904 bp, Cucumber endornavirus 1
  source 1..14904: mol_type = other DNA
atgaaatacaaagattataaacccattcggaaagttgttaaaccgtcagtagttaaaagagaattctctacaaaattacaaggttggatcaaactaccaagaaattgtggaatgagtttaaacaagaatccatttcaatctagttttagaaaagtattcaaacagaataaatctctcatctttgataaaaataaaatcaagttggtacctgcaatacgaggtgtcaggaagttcagagatacatgcggagctgtagcatcaaacataagatttgaggatcctttagctggagttgtgaattttgaggccatgcacccattagatattgcaagaatttattacaatgttataaatggtggatgtgaattatggaagccaccacacaaacctatatcagattacctcaatcatacgaaacacgaaggtatcgatgatgaagaagatgaagaagaaatgtttttggatagtaataatttagatgacaatcttatagtaaagatagtgggaccgggtagaggtaattgtaccactgagatgctggaagtcttgaataaattagtggccaggttcggaggttatgagtcttactataatgtgtaccttgaaacacaacacaagcattttggatacctagagaaggatgacgaaggaaagttctcattcgtaaatgccaagttcaaccctttgaagaaatgttctgtatgtaaatacatgaaccattatgaagagatgattcgaggtttgaggatggtacattatagtctgaaacactacaaaccaagatctaaagtggttactgacgaatttttgaccatttacaatgaaggggacattatagaggatgtgccttggcgttgtggttattgtttttcagatttgaatctaaagatatcaatgcgtgaggaccctttgcaacagttaattaaaatcgtaaccagtcaactgttcgtgttaatgggagatattgaacaattgttgaaaatgggttacggtgatttatatgacgacttagatgtttccagtaaagaaaaactaaaatccgctgatcaagtgatcgttaacgagtatttttatcatttgcaacgcaagattatacctgtaggtcaggattttgaagcggcacaaggaaaaaatattacggatgtacttgggggatgtttcttcaagccgcagagtaaacttaacagtgttaaacctgagtttattgctgagttgtcaaccttaacagagctaattgagaaatcattcgcagacaagcaggtggctagtgtaggccaaattttaccaggtaattcaaaagataatgtacacaattggatgcataattcaacttggtacaacccggatcctaatgtaaactgtagcagtgataaagtatgcggccacaaacacaattatatcttatatggtggaccatcactttatagccatagcttatccaatgtattagctttagttgatgagcagcgcactctgcaaatcatcacacctatcaaaacttcacagaacacattagcagatggaactggagcgtatcaaagaacaaatgaatacctaaatttgtatttagatgggaatgccacaccattgcaactgaaactggacacttacacaatcataaataactaccagatattaaagttaaacgataaattatactacgttattgagacacagaagttaaagttaaataaaatcatgactatagtaggaccattttcggacaaagttgagtatcctcgcaagttaatcaagaatgacaatggtgttaaattgagaatgtacttaccaaatatagatagtttcatgggaggttttagaggtctgaattatgaagagcacgaatttgagttaaatgtctctctatttagatatttatgtttacggaatacgtccggtaaagtcgggcatgacacactgcgatcatatgctgtgggttattcattgcgtagatttgtggttcatagcaaagtagtgtccaacccgacgatagtttatgaggatatagatatacatgtaatactaagcagggtctgcatgatgaagttaagaaattgttatgatataagttacggttacacacaattctccaagaaattggggccgttcagaagctggttaggagatatagagagtgccatgacttcatcatttttgagtttaataaataaattgatagtagacgctatgggtttagactggaatgtggttctgaactttatagatgatatacgactacaaacgttagtggacggtatatcatctaccaacttctgggagaaattactggcaatggcagagaatatcaatacagaagacgttaaagtggtagatttagatcaaggagttgacgtatttgtgggacccaacattggttcttgtaatcaccacaaggatacttgtcaacatatggataacggaagcgagcaaagatgtctatgttgtaacatgccaattacagaatttgaattctgtgtgtgttgttccccaaaccaaaaagaggatggcaatttctttgacattgacgaagcgattaagaaagaagtcaaacaggagatggaactcaagaagactgacccagcgaagaagggggctttaaataaaattgttgaagagatagagaagatggtcgcaaacaaagatattaaaaccacaaaacctggttccagtacgggaacatgggttagcacagttaagagaatggcttcagatataaaagagagcataagtaaaaccactggaaagacaataactggtgaagacgataaagttgaaagtaaattagtaatcatccccggaactactgctgacggattgccagacgaatctgttgtaactccgcctagtgaggaaatcccaacctcagcagccggatggaaacgcgtgacgcgacggaaaaataacgatccacaaaacatgtcagatcaaatggtagctgaattgctggacaaattgcaacctttaactgtgagttcagacagtgccgaagcaattcaaattttaggttttgactttgtacaacattgtctcgacccaatgatgtacgagaatatgttaaacgatggatctaaaaccctttataccttaccacacatgccaatgggggaatttggtagtcaaaataccatttttgaagtagtgaccaagattgtcatacccaactccgaagctatgacctgtgcttatgattcgtatcgatacggttaccctactgccaatttggacgaaatggttgccatcaatgaatcaccaccaccgttagataatttcacattggtaaggtacgctgaatctagaaaagaaaatttgatcatagtcggtagcaaaggtagtttatgggtgtcaaagaatagtttgacgtctaatgatttccattgtatttggtttgacgagccagagtcaggaggaattggtcacttcatgcctgctataatcaaacgagcgtcaaacgatcccttataccttacacatactttaccaggtagtagggatgaacggagtcaactaattaagttgcattatggtaactcatggtcaatagctaatttacctcaaaccttcacggggaaagataatttgttgattgagttaactttctacaatttgcacacgtatatgtctaacaacacctctacgagtttgatatcaatcctaaaacataataacaggatttacataaccaataacaaagagtctaaagtacatgctacgaacagagagaaaatacacgtagaagtgccatcattccttcataaatatgcagacaaattgggcctagctttacaatttaaattggctccggatgacgtgcccgaaatgagacacatttcgaacgaattgccaaacagttatgaaaaagaaatagaagaagaagttattgaaatactcagagcattcataagaatatcaaacattaaaaacggattagaggccaaagacattaaattcccttataaaggtaaactcaccagttggtatggcaaaagtaaattcatgattagaagtgacagcatgcacaagatgaaaagatacgatgtcttggcaatgaaatttgacaataaaatagaacttgtgtatgttttaggaacggaaggagatagtgtcatattggataaaccggttataactagtcaagaggtaacagtatacgaattgaaagaatcaattggaagcaaaataagagctttagtgggtttatgtcaaccacacatctctttagaagctttaaaggaaaagttgaaggttgcaaaatacataacaggaccagctggttatggtaaatctacaacaatatccagacaagcacaaccaggtgatctatgtgtggccatgacatctacagctgttcaagccctgagagctaaatgtaagccagacgtgaccgtgttgagtatggaaagagcattttatgaccattgcaagactaataatacattatatgtagatgaggcaacaatggcaaactggcttcaactcggttttctatgtgggccggatgccaacattgcattgtacggcgcagacaaccagatagggaagaaagatatgagtgctacgcccggcgttagatataatgtaacactcaaggatttcctaagcaaagaaaatataattaaagagttccattcatatcgaataggtgaacctatggtgcaactgttacaaccgatagaaccaggaatggtaacaagagcggaacacaagacgacttataatatcaccacactagataacagtgaatttgaaaacatcaaaacaattgtttcacgtctgaatcctgatgtggtgataaccccctattcagctaataagataaagattcaatcgttattaggttccatgaaaactagggtagttaccacccattcatttcaaggaatggaagtaaacacagcacttgtggtgctgcgtgaagatcaaaacaggtcgagagagttaaacggtaatcctgagtatctaaactcagctctaacaagagcaaagttccacacggagatagtgatatacgggcagtatgggacattaacggatctttaccccttgttgagacgcgtgggtggtctaccaaccgtaaagaatgtgctaggaccagctacgaaatcatcaccggcaaaggtgggggtaaacgaaatagacaagactacagggctaccaaaggagataaatattaggaacatgcacacgctcacgagcggaatggtggataaactcaactctttaggaatatcaaacagtggggttatcctaagctatgagaagttaagtgatggaactagagtagtggctaaattaggtaatagcacagtgagcactgtgacaaatcgcaatggtgtgattgatatacaggctaacagcttcataaaacacaaaattatgaataatttagataccaatataaacatcccaacatcagcgcgagaagatgaaacaggatttgatgtaaatgagttaatagacgttagttttaaacaaacaaataaactgagagaaatggcttggattattgacaaggggacaacaaaccacatgttcctcaaaattgaaggagaaatagttaaagtaacaaaagatagtggctgtccactcttctcaggtgctacgtttgaatgtaaagatgaaaaattaaagatctcgaatggatggcagagtttgaccaaacgacgtttatattttaacagtaagacagagtacgtacgtctaagttcagtaataaattggttagacttatcccatgctaagttgaagcacaataaaaataaaccaatgggatggttagaagtcatgaagggtgacacagtgcacacgctgtggcaattccaagaaagattgacacaagttcatctatggtttttaaactttttaaccgttaatggaaatccaaaatgctattttaacaacgttaaaaatgtggcaaggtataataaaatggctaggtcactaggattagacccagttaaccatcatcaatcagtggtgtatcatgaaaatttcatagcacagtcaaccacgggatggtggcgacacaaaaagtataccctaggtaacggggatgaaattttagccgaggtaagtgtaaaagactcagaggcagtttggaggatatttgcaattgagagtttggccgacatgcgccatacctacccagagtgcaaaggtatatccggcaccgatttcgacataccgggattgcacatacctttacacaaacatatggccaagaacacggcaatacatcaattagtgtgcagcaacctggcaaagatcaaggagcagatacaacctcacacacatgacatcatcagaatggacaagaaaggcatgcatatggtcagaaattacttgagtcaaaaatatccaaagatgacattgaccacaggcagttatgagttgccaaactctcctgtagagatcgctatggaacagataatgttgaatatggtaggaagtttgagtaaagatagtaaaggtatagtggcgtacagtggctatgtacctttgacaattgcaattcttggaaaatactatattaagttagcaattcctggtcttgatgaatacggaaggttcttttacgacatgagtaaaccacaactcgattcaatgttagatcactttaacgcaaatagggcgaaaaaggtaaattggtacattggaacggacgtaatattggaaagaatattgttggggactcgcctaggtgggatgactccaaaacaaataaacgatttattaggtaggacgaaaagcgtatatggttggatgcctatgtttaaaaagagcactgaacattacaactatgaccacaagaacaaattagtcaattttaaaaacggtaaagtatctaatccattacataacgagttatttaattgtagtctaagtggtaagcccatattagtatcctatgagcataattattacttagagatgtcgacaatgactgaagtgtttgaccaccgattggtacaaatcacaaagaggccaattccaattgaacggtatatcgatagaagaattggggcttattctgaaatgaacaatatcattaaaatcaaagttccatggatagacctggatttgttaagggtgttgtcagacagacaaattataacaattaaagagttaactgtgaacaaaaaattgttgaggaacatcctattacgactaatgacgggcgaggatagtcatgatgacgcattaaattatgctcgtactttagagtctactcaagtgatcacagacagaggtatagatgatttgagcacgaccaacctagtggtgactttaaataccacatggtatgcaatatatattcataatgattacttgagaaagttccatggtctgatattggctgttaataaaactcaaggaaaaccaatagccgtaggattgttggagcaacttatttctggtttcagcaagttgttaggaaaaatgggctcgatatcacaagaaatatttgagaagtacataacgaaattgaataataacgtgaacttaaccaacaggatggctgattgcatcgaggaagcgaagaaaacaaattgggcccctgagatgaggaatgtttattttaatcggttctacttctccaatgatggtttaggagaaataaacgcttggtttaaacccggagaaggagacgatggtccagatggattccatggcaaaccatcaacggataacaaagatgaagtatattttgataatgaacactttgagcaagagaacgcatctagatacagacaaattctttcctttgatgagcctaaagtctcagaatcatctcaaaaagcgacctcagaacaaatcatcgagtccactacattggaagatgaagattctgaatttaaagacgctatgagtagtcaagaggatatcagtgatgtagatgaagctgatgaagatatagcaattaacattgaacctattaattgtttaatctcaattgataacagtctctatttagaacaaaacgtgaagaatattcaaactcgtaaacatatctacggctacatagatagattatgtcaatataaaatactatcacaaccagaaattagaaactgttttgagaaaattcacaaagacttattactaaacgaaacatatgacttcaactcatatcagccaatagtaagtgaggggattgtgacttccgaagaattacaggaagtgaagtacaaaattgtgcagtataattccgattatatcagaacgaatgaagaatggacctcaagaccaattaaagtcatacactcaagttaccatgctatacctaaaatcatttggacttactggcacactacaacagtcagtggtttaattaagaaatgcattaattccatccaagacatgaatccagattatcaagtggtggtagtaactgatgaaaacctaggtacttatgtgagtagagagtatccggggaaaaataataggggtttgatggaaacaaagtccgattgggtcagattgaatctcttgttgaagtacggaggtgtctgggtggatgccagttgtataggtatcgattgtttcgatgaatacatggaactagcactatcatcaccgtcaggagtcttacaggtcagtacttcagaacaaacggatccgataaagatactagagaattggttcataataagtcccccgcataatccactgatacgagagtggatgataaaattcgaagaactattggtcaaagacataaacaatttgcaagatttggatgatcatttatccgggggatatgaaaattatgaagttattaaacacaagttagatgaacacagtaggtactacctaagatgttacttggtggaaatgttggtaatacactcaagcggaataacaccgtacgcattgacagcagatcattcaagggttgacgtgcatcatgatgtcaaatgggaagaatggcaaagaataccatatatttattcaacggcacataacttatccatgaaagtgcctatagtaaaaataattgacgtacacagacggataatagacttttacttgagcgagggaggaatcgtagacaaaggttcatggttggacatgcttgcaaatagtacccatgatgtatgcacatacacggatagtcatttagtggacaaaataattgacacaacggacaagttttatgtgaagttggacacggatcagaaaattcttgctcaccgtagagacgttgcacgtaaatatcaaaagtgcatcatcaagaccttagaaggtaaaaatgacattatgatgagcgataaagttatagaaattatgggaataatttttgagcttggtttgatgttcgtcttgactaagactcgtttagctgaagtgctactagaactgttcaatggatcagacataaatcaattgcaaccaatggaagtgataaaattcattgagaagcatgttgcgatcaaagcggtccgtaggttcaaaatgattaccaaggttaacactagaataaaccggtgtacaagtctaccagaaaaaccaaaatacgtcgaaaaagacgggatcagaatacctttaattatatggtcatattgggacgacatcatggtaaatgaattccaactagagataattgataattggtggtatcacaaccaagattacagaataataatactaaacaaaacatcaattagtaagcttatcaatcgacctacctatgagctgttaatgtctcagaccccacaatatagatctgattgggtcagattgtatgtattacaattaattggtggagtgtgggtagatagtactgggattttccaggattcagtacacccattagtgattgagacgttgagtcatccttccggagtttaccaagtaagcattcaaccaagatctacgtctccacgatactatgaaagttggttcattgtgtccacagagcgcaacagattgatgagtcaatggttcaacaatttacacgagatgacaaaacacgtacacccaagtggtagtaacgctctcagttggctagaacaaaattacggtgagcattaccatgcggcaaagcatttaattgtaccgaacctcagagtgtatctgagggtttgtttgataggggttatatctaatatgcaattaggaatcgaaccattaagcatttgtgaggacgaaggtgaggtaagtatgtttcacaaactacctaaaaacaaatggttgagattttggaaagtcatcagtgaagagccggcagaaaattgtagagttacatttccttttattaaatggattgggttacaacgaaatataatattccgaagctacaacccatccatacctccaaatcctaatagtataattgggttacaaatgttcaaagcgagagtgacatacgatgttactaacgtcgggaacttagtttgcccaaacaaggagttagaagaaccaacacctaaatcaataaagatcgatcaatataaacaagtaaatactataattatgtgtataggaagtggaggtgacatattacaatttatcacaatttatgacctactagagtccattggggttccatctgttattgtcactcatcaagatcatggtgataatctaggaaacagacggaaacatttactcacagtgagtgctgaatctatcatggaaactgttgacgtaaaactgaccaaactggatattggtaccgacataaaaagttaccaacaaatgaatagtatgactaaagatttagaagaaataattggaaattatgtacacaatgttaaaacattaattattaatagtgccattccaaacctgaaatatttctcggaagaatacaaatttaaaattatagaagtgtcgacgttcccaattgactgggttttcggaaatgctacagagaacgagagtcagagcttaggaatatctttaaagaaatgggtctttaacatgatgagtgacaggagtaagttaattaaaacaccagatcgttacacttattacaactcatgtagtaaattgttgtacccagaagggaagaaattcgtaggacccctgactttgtggagtcacgagagtaaggctgatgaattaatcatgtcacctaggcatatactggtgactttcggtagttgtgataagactatcgaggcttccagaaaattgatgttgtttgataatctgatcaacctagggttcacaatcatttatcatgatccatataaattgtgttcagcaggaacaatgctttgtgatgaattatacagaaggcaaggtaaagtccagataataggatctttcgatttacgcaaagtgtctggtcaagatctgaaaatactgacacatggtggacacggcacggtaatggaaagtttaatgacaaactttaaattgatcattcaccctattatcgcagatcagtatcagtgggctaaacgcctcaaagcgatgaagatggcaacagtgttgtacaacattgatgatgcagaacagtgtaagttggctgtcatagaattaaataagttggtgaactacaacgaagtattgggatcggtacagggcattagtactttggaatttttacagtcaatcaataccagggcaattaattacaatccctctgttagtctgcgagcacttagggggactgttttagaaccaacgactttacagtttaagaagggaatatacagacttaaaaacgtaacgtattctatcaaatataaccccgtggtagtagacagatgtgtgttggaaagtactaactttcaattcaccagtgacggtcaaacagaattcagcaaaatgagaattttgagtgccaaccggttaaaagaatccgctgtcactgaaggggatttagtaaatggggttctcagcatgggcctcaatgtagtaataatatacaataacggagcaggtgttgtttataatatattcgaatctcctcatttaatatatcacattgaccgtagttgcctaccatggcacgtaagcgtgccagaagtggcagattacgaagagggactgtcaatggaagaattagccactccagttaaagagttacccgacgatgttataactgagagagataacctaagacgtgacttttctgttatagaacttactaatcctagagtgttgtgcttaaatcttgggaaaaagaaattagagaatttgaatgccagattgaaagggtttgcattaaatgaactaggagcaagaaccgaattacaatgttgtaaattagaattaagaagacatggttatgtccatgtaggagatttcaacagtgtcgaccatccattatctatagggtgtattacagctcagcaaggttggacattagtcacttggcaggttaagaacaatcaaatgatcatttatggtgaactaggtatcttaacaaactcagtgttagtaaatttacacatacaagttggagccaaacaaccaattaaaacaatattaaaacgcacagttgatttagtaagtttaaataaagcaaccaaacaacataccataatgaaccacctaaacccgaggagtagtcaacttgttaacaactatatgcaagattatagactaatagtcagtgattatgacaatcgagatcatcatatgtatgacgaattaagtataatgaaaaaggccacggagataattttccatagtaatagaagggtgactttagacgatttcattcgaagtcataatgctagtcacaacagaatggtattaaggcagggaatgcttgttttcgagcatcattttgagcaaataagtttaggagccatcttattgggcccgagttgtcgatatgataaagagaaaggtggctttgagacagatagtgttctgaatgaaaaaatccaaaaatttatagaccattattgctccattcaaggaccgaaactgcacatgaaagacgtttggatagtggatggggtacagatattgacagttaatgaaattaaaccttatataaccagatcttacgtattgagtccagccgaaaaagagaaattagagagtgtagtgagcaagcacccacattgggaagtcgcccaaatgacccacttggaaaatgatacagaaaacataagacatattcaagtcagtaataatgggagcatttacctacaaagttatttaatagtattaagaccaccaaagaccggtggagaaagcgaattagaaagacaatggtggaagatgacccacaagaaaacagagagtaaccccacccctggtaattggtggggaatgaaaaggaatgaaacaaagaagactaaaagtgaattcctagacgtaatggcgatcaatgaattacattaccatgaaccgcaaactctaagtgtcgctctatcaaatgactgtgaataccaaccacccatggacatatatatagcaccttacgaatccgtgtatccaggtagccttttggaaccattgactgatttacctgataacatagccatgcaattgtgggaagataatgacttaactaattggttaaacttatatgcacctttaaataattgtatcattaagacaagggaattacctggaaaaataatcaagtcagaaaaattgactatgaccaaatggccgatcagatctagagctatattaactaaagtatgttttgaagaaggacgaagcataataggaagaatgaagtcagtggcatttattagaacaaaaatgccgaatccatttagattagttttagatatagccgacacatatttcagacccgattggaaacaaatgataagcaactttaggcaagagctgttaatcatccgccccaaggatgtgaaaaattggatagaacagaataaagattgtgagaaaatagagaaagaattaattgatttgttatgtggagaattaatcactaaaccaattaatgatgtcaatgtacatctgaaactggagagtttgttaaaggaaaattttacaataatgacaatgcaacaacaagctagaatcatagtgtggcagcgtaaagctgtgtgtgcaatctactctaatttgttcgtagaggtcaaaagacgattgaaggaagtattgcacagaaaaatagtatatgcggatggtttacgaccggatgaaatatctgccagagtccgattggttaaaaacgtagccggatttttcgaaaatgatttgactaaacaagatagacaaactgataaacctattatagaagtggaattgatgctttatgatttgttaggggtgcatccaaatgtcattgcatcctggaaagaaatgcatgaagtgtggagattcaaatccaacctttattggggacaaggtgaaggtatgcgattgaccggtcaagccaccactgcattaggcaattgtataacaaacttacaggtccatcagaagttcacaaagactaactttcaaacattgcaattgggtttgtttttgggggatgacatgtgcatgatattcagtgaaaaacctgatacttctaatttgcgaaaagacatcgctgcagaatttaatatgcaaagcaaagattcatggatggtgaatggagcgacattctgtagcatggtgatgaccaggacgaattttggagcggaattagcacctgatgtagtccggttaaaatttagatatgaagtgccaaatggtgtgcatgaggcaacagcagagaatgtgttgatgcggaaggcatcttatctcatgatgcttggaaaaggtccgaatgtcgaggaaacggtaaagctgttgaacttaccgataaaaccaatagcatggtacaactatgattatatggtaacctctgtggcttacaagtacaatatgacagatgaacaggtgaggggttattatgatcaacttctagcattaattagaagtgaccaaatttactcacatgtgtttagacatttttcgaataagtag

SEQ ID NO: 1217 - DNA, 9957 bp, Diplodia seriata endornavirus 1
  source 1..9957: mol_type = other DNA
atgacgcacaacacatccaacgataactacacacactccaacaatggacaggcctggcccgaccagtccattgttaattatagggccaacaaccaaacaacacaccaatctgagcgcgctgagatccaccaaccaaaccagccagctttcagcttgctgagcttgttctcgggtcctcgacgcgcccaaccacctatcgacgaagaacctgaccaagtcactttcactggaagggctctacgcgcccgacccgctgggtggcaccctgctgtcgccagcggtgatatagaattaaacattccgcccctacctaggttcgaccccacacaacacccaacctggaccacatcttcgaacaacgaccgcctcaaacccagcctcagctggctggatcacgatcccactggacccatgatcgatggctatcaactaacctcaatcgggttcgtggccttggaaagaatgggtatgaaactcagaaccaacagcttatatctgggtgattacatagacgaggaatatgaatttatcctgatgccggagacgcggtatgagcatccgggcgtggttgcagcttttggcaacttgggtcgcgacacaatcactgagaccttcaaccgaaaccgaatgtacctgcgagctcttgaagacgtttgcgggtgtcccctcgccagcctcaatcaaagagcggcatatttaacaatgctgcacgagtcaggctacgacctgatcactttcctgtcatacttctccacctggccgcaagaaatggtgcatctgcatatagctatctggcttagcggtttcatcattgattttgatcacaccatcctcatgcaactcaaactgagctgcatcaatcgaatcgaccccgttttccgccacgtcatcatggcccatagtggcgcggaggtagccgcggagatgagtaaacatcagataacagcggttgacggtaagcagctcagtacggaacaagtgtgcgtgagtggcgtttggctgactctcgggcacattgaagcccgatcaggggccaagttcacaatagagcaaatcaacgactgcgatgcagtggatggcaaagacgccaatttacgcaagcgcatggaagacatgatgcttggggacacgaaggacgccctgcgggggttcacggcgaaaggagcacttgaccaccacaacaagaaaatcatagacagcaccatcagactaaacaccttgcacacctatcctatacccctcaacacgagcacatcggtggttgaggcattggagttatcctggccgcggaaaacatttgtcaccagcactcaatgcgacgatcacccacacatttatttgaatgtgagccggaacctttgtagggagtggattgtcagccagttccccaggaatcaactactaattgatgccgggggtgatttctaccaacacatcaaatcaagcaattggaacgtccacacatgcttcaaggacgccagcgcccatgaccacgagcgtttcttgaagatggaaacaaaactcatgaagtacatacagaccacgagtgacatggttgcaacacagaatggagttaaatccctcagtgaagatcgcgtcaaaggccttaatcgcatccgacgtggccgccaacagtattaccatatagctgacgctgagaattgcgttagtcggggtcataacgggtggtctttcggcatgagcgtggacgccctattttatatatcaccagagaagtatgcgaagatcatgaaggctcacaacatcgtccatagcattcatgccatcactgttccccccacattcatgtatgccaaaagtgggaaactccctttcaacgagggggcatggcttgtgaaggacgacgtgttctccatgacaaccaatggtgagagccatgtttactccagttcttacaagctcctattaaaatggctcacaacgccactatatgcgggtgacggcttcggcatgtacgtgcggaatgaaggatacaagggtgcacacatgatattgcgggtgactcgcgtccccctcaacgtcctgcaggcggtcacactccgtcattgcgtatggctcagtggcgacgctgacagcttcttttatgatgtgccattaatcaagccaaaccggcacatcacggcgttgtggcgccaaccctttgagacgaagcgaattagggtcaatatgacactcctagaaatgttgcagagtcggctgcgtattgagggttgcacggatcaagatctgcacgaatacgctcgcggtttgaaatggactgtgtacacaagtaacacaggccgaactagacagtttgatctgtctgatgctgagatgcaagatcacgaattgctggcgatccaccagcacacccaaatggttgagacaatgaaaccattgttcacgtgggctcgaacaccgaaacgtcaagaatcatggcttagccaagtctggatcgctttccgcaatgttttgctgaagttgggtaggcaagttgacccaaccgaagaggattgggtgcaagaactcatcatgggcaactcaacagcggatgagtacaaattgggtccatcccacattaacgagatgctgcatgacatcacacaatatgagggcttagctcaccagatcgagagccggatccccgcagcgataacgtatcacaatcgaaaccagattaaggttagttggaaagatcaaaagatggatcgactgagcttggtcattcaagatgacgacatgtccaacagaatccatgcccaccatcacaaacacacaaaacaattaacggacaaaagttgcaagcccaacccatcttgccctcacgagcacgacaccttggacgagcatgacctgaggaggccggatctacccatgggtatgtgttcatgctgtgggatcgagtccagcttgtacggccatctttgcgatgtctgtcgacggttgcaactatgcttaacagcatcacgtgattgtccgcacacacacatcatcgagtcagagcattgctgcgcacagcgaaaatgtgcatgcaagcgtgagcaaacttgttcatgttgtggatgtgcatccacatccaatccatgtttgttgtgtttagagccaacgcaaccagccgttgttactaaagccatgccacaacgagctcagcaagaacaaatggttgaagagattaacactcgactctccagcgctacatcccaacattcatccgaaggcatagaaatcattgacaacaccttaagtgctgatgatccattaccgcctgccgagcaagaacaagtagctaaaggaacaatccaactcatgagacacaatttcaaattcacgaaagagctgaccaccatacagtcggcaaaaattgaattttatgacgaagtgcctggcaacggtgattgcggttggctggcagtccagagccttttcgacttgcccaacagtgacttagcacgcctcaagaacctcaccaggaaaaccgagtggtggggctcgcaagagttgggcctcttcgcaacagttttaggtttgaacctgttaataaaggcaggcacgcagaccacctatcatcaaggcaatattctgtcacaaatgtacggatcgataatccacatgcacgacatcaacgggacagcccactggaacccagcaatggtaaccattatagagccccaagtgtctgaaggtaaagccagggctgtttctgagagcttggaagacttcattgagcccggtgctgacatgaatgatgtgtcagtcagggcggaggctgccgagcgcatgctcagcacacgaagttggatggcggcctggccggctctgtccttattacaaaattacccaaaccggataatcgatcaaaacacgctcaccatcccgttggaaccaatggcgtccacaccgctaacccgattcatttccagccaatcaactttaaaaacccgtagcgccttagattcggcgctcgtgagacaaaccagagcccatggtccgagtgatctgatatggtttcctcgcaggctgattaccatagtggggcctaaccagcgcgaatacgtcattaaggattttagcgttgatgggttgttaaagctggtgtccagcaaattaaatgtcaccttctacaatgatcccacgagtctccaagtaaaccaggcaatgtggatatgtccaacgaaggccgaggcagaagacgtggccaatgagcgcgagctgcaggttgtacctagtgggcgcaccaccggagaggcgtgtgccacctatggtgatcctattgacgtctcacacccacataaagttgtagtgatcggcctcagtgctgaaaccagaatgctcaacagacgcgcagccatcgatcacaatggaacaggcatgttcaacgtgaccatgcgccgaccgaatctattggctgcttgggactggattagttccctatccgcaattggtgtagaacatatttacatgcccgctccactgaacaattttgatctggatgattatgaccagctcaaagtgatggaaccaacggaaagggttacgaacccaaggcttagcgccatgatgagtgatatgtccaagagaccagagaagaactttggtcaaaacacgaggaaccaacccataggtgagataatagaaacaatacgcaagggcgccaccccgatcgatgcggatgatgacgtccgcaactgggtgttggacaagggcagccccagcgtaaagcacgtcacatctagaggcggactcgtgtcgttgtgtcgggtttgccacaagcccatgctcaccctccaaccaaagcaggcgtgtacacgatgcaacggcagagttaattgtgccataaacgaaccagaccacctaaacggattgatggtaaaccaggatgtgataacagacacacctcgcactgaagtcctagacatgacaatgaaatcaaacttgggatcgagcggagcgaaccgctctatagcatgcgcattatgggagagatggctgacagttaccaatgcgctaatcaggcacaccaccagacaaatgggacatcgccaagccctgtatgtgcgcaaacacagcgcatccatcaaatcaaacacgatcgccaaacccccgaatttcaaaccatgctctgacggcgaaccggtcgtaatcctgagccccagcacatggtgttgggcgtacacagaacgaggaacaatagtctcaacggtcaacatgccggatggaccgattgatatcatagcccacgtacacaacgtgtcgcattgcccaaaaatgatcgcgcacgcggccgatgggattgataggaaactagatgatctaaaagaaatgctagctaatagccaggtaatcatcggcgtgcctggcgctggcaaaacccgcaaggctttgcatgacaatccaggcatgccactgattactatgcagactgaccacatcgaagtattgcaggcagccggccatgtagcctacacgccaagcacggccctgaacaagcacatgccagagactgtgataattgatgaactaggcaaatggtccattctcgacttatggcctttcgtgaatcgagtgaagcgtttcatcgggacggcagacctgaaacaaacgggtgccgtgatcactgaaagtaaacacctaaggttgagcgctgattggcttgacatgatccccatcgcgtcagaactcacacattcgaggcgattcgggtccaagaccgcgaagatgttgaaagcattccaccaggacatctcaggcagcaacgagtcagacaatggtattgatgttgttcttgtaaatcagaatgatatacgcgaattcgcgcaatccatgattggtcgggaggtcaaccgcgtcatcacaatgaataatcgcacactaaaaatggtgcaggaggccacggatctaccagtttcaacagtcgatagaacccaaggcatgaccataccaaaaacagcggttgtgattatgtcacacgacttaccagattgcacggatgagaggttgtatacggctctaagcagacacaccgacggttgcaccctcatgttggcgaaagacgcacaggacaacatcactcgccgactcaaccccgacgtggctggactcagtccgctgatcagtgagatgatgaactgggtggaaggaccagtcgcggttactattaagattggaaagaaaatcacaataaagttacgcaacctagtcaaagccatctgttcttgcctccatgattgggctaagcaaatatggtcttggcttcaaatgatcttgggtgattatatgccgatagcttatcgggcagatactgacgagatagtgatcagtgaggatgacaacttgcaatatgagatcgcagatggcctaggtttggctttcgacgatggggaaactcccgatctcaaactcgtcgaacccacccccttgattgagcaagaagaggtggacgttgcttccacaacatccatggagagcgatcgtttggtcgtaaagcaccccaaacccgcggaggtggaaactgaatcggaacaagaagacgacgtgagtagtgttatatgggagaatcattccaactctgacattggtggtcgcaacgatctggcccacaccatggtgaaacgagttagggccgtgatgcaagcgatccttaattggatcaggcgtgtcattgatgctatcaaaggtgggtataagagggttggaaacgccattcaccacattaaaaccaaccatacgcaacacatagatgttgatcaagcaccaacgatggctgacttcaacccagaaaacattgagacgaggtttaggcccatcagcgataggcgatcctgggcaacggcaatgaatgacataaaccaggagcttcgtgatgcattgaaaaaccccgaggatggggacagtcaaccaacatccccgagtgaggtccgacgcaacagcaagatgcgtgcttctataacccaagccaatgatgtggaagttataaatgcgccctcccatgttctcaacagagagttgggctcaaaatacgtccgcgattggaacaataaaatcctcaagtatgacaacaccttcgtttgggatgacttaatacttaacatgcagccaacgactgtgaagagatatgactggcctgccttagagatgcaagttcccatgatgcccaccatccgagttatgcgggtgcacgaatcaattcagaacaatgagggcgtttatgccataggcatacgtaacacctggttcttattggcccggagcaaggaaggtgacaccatggagatgtttgcccaatcgggttacagcgccatgcgcatgccagcgcttaacactttaatggctttgctccgtcgacggatcggagggggtcgtaaccacataatggacattttattacaactggcagactctttgagtcgctggcttaaaatacgtttgacctattggaaatggtattcgagatgcctcgttgatgcatcatataaacagatgccgtcgacgagagtcaagatgggtcgtcatcgagagattgccacgtggctgtactcacggccaaacgtgcaaaaccttgttaaaaccggccgacttaaattggtgaccagcgccggcgattgcatggcggtcatctatggggtttccaggaaacgcaaacacggcttgagagaaagtcacttaatgcggtttaggcagacagaggtggttggagagtgcatagtcgatgaaatcggcgaccgcatcccaacatcctgggtgacagatgcagtgaaacaaatcgtgatgcccagcttcttagaaagacatggcagatcaaacagtatgccacacctagggggaaaaaatgaaatcttgagcaagtattggagccggtggctgggaatgcccagtcgggccccaatcacgatagaccccacttggaaggatgttaagtacaacatggcttttgatgccacagcccagccgaagcgcatgaccaacgctttcacgcatgtgaacaaagacccaacaatcaaagacacgccacacattgtggacgtggactatttccacgacccaagtgtggtggcggtctgcatcccgagcggtgctgggaagacagttatgactgggaaaaaccccacgctaatgaaggatgttgatgatctcatgaactggcctgactttgcgcaactccaaaccctggacgtgaacgccggaatgtttatgctaaccgatcaataccgtcgtaaaatagcagagtggttgaaaacagatcacgaacagcgtatattattggttcaccaccctgacttcgtttcaggcttggttaaagacatcttggtggtggagccaacatgggatctagctaagccttggtcgcggaaaaatttacaagcattggcgagcagtcacaaaaatttagatcgcattaggccacgaaatcatgggtcaatggagcgccaggttaaggagtgggcggacacacgtttagtcctcctcttaaaagcgaggtacaacgacaacaatgagatcgatgcaacagccgaggactggtttaccaatcgtgatcaatctctattctcagaggtcaagttgccctctgagggccgcatcaaacatagattgcccatcatgcagcaggtgcggcaaaacataacagtcatcggacacgccccaaccatagctcgaccagtcgtacacaagtacggcaatcaattgatgaacagcatcaccacccggcttcatggggttgagaacttgaggaagaatcgtatcgacccggaagataacctggagtcgatggcagaggcgttcttcgtgcccgattggcgtgagctactgataaaatatgaggaaaacccggtgtacccatcagcggagatgacggaggaatggttgagtatgaaaggtgacgccaatcgtgttgtcaaagagatgcgggaagtggtgaaggcactttacaccaccaaacccttcagtgacacaaaactacatctgaagtcagaggtgctgctcaaagaacaagtggataaatttgaagatcaaataggccgcgttatagtatggcatcccaagtactattgtgcgatcatatccccaatcatcaacatcctaaaatcaaggttcaaggcattgctcgacccatccaaatgcgtgtacagtgatggattgactgtcacagacctacagggtgtcgtctccgatctcacaccgaaggaggttattgaaatggacatgaagaagcaagatcgccagactgaccaaggcgagatcgaaaatgaggaactaatcatgatcaaactcggcttcccaaagttcatgatggaaaagtggcactcatacaattcggactggcgctacgtcagtgggtcaggcattagggcccggcgtaattggttcagaaaaacaggagacgagatgacatcacttggtaatgccatcaaaaatctgagtggtttggcagcacccttcatcaagttcggggctgaacgagtcctcgtcttgggcgatgatagcatcgccttcggccccacgcaatgggatcaaaggtgggtggaggaccacatggcccagaatcacaacgtgcgtgtcgaatgggctggagggtctcagggcaagttttgtcaattcataatatcacccatacgaaatcacggctttatagtggcagcggatttccacagattgaacgacaaatacagggcttacaagagtatgatggaacgtggatcggaagattggaacatgcgcgcatattcatacctatgtttagttggaaaatcacacgacacgatgatggccacgtcgcgcatgggattgccccgaccgatagattggagccgcgcctactggctaagagcgcaggccaatgcgaattatcatggcgtgtcacgtgatcgagtggacggatgggttagcgccatgatacatgacatggaacacagcacgatccgacaccaaaccttcaaagtgttgggcgcgaagcagcgttaa

SEQ ID NO: 1218 - DNA, 15573 bp, Fagopyrum esculentum endornavirus 1
  source 1..15573: mol_type = other DNA
atgggcggttcacgcccacactctcttagacaaggggggggcctggtccccttgtctaaaaaagagaaatatagaatgagctactcaatacgaaaatcgtttcgtgcgggtggcaaacctataaaactaggcgaaaacaaagacatcataccatgtgcgattgcatgtaggcgtgatgaacataaagaatttataagctttggggctgaatttatggttccagattttaaccacttggacgtggctacgcttagaaactttatattactgtatcgtgagggtatttgtcatatcagcactacagtagacaaaaacaaacagattgttaagaatgtgcatttgcaaaatgaagaaccttgttggggacccaacatgcgtgattattatgccaccaaattgccagatgacatctgtccccacaaagaggatccaacacctgatttggcatcaatagacttgataaagcgcattttgaaaaaatacggtggcagtttgagctctatgaacaaagtgtcagcccacatgtcaccaaacatgacaccgcatatagtgagacaaaatgggaagttctcagtcaacttgatggaaatgcaagaagcaaaagccattcacacttgtgccaattgcaacacattaaatttggtgtggctggaggacgtaacaactggagtgaaaggtcaacactgcgggatctgcttctgtgagctagacctaaagagaacgatcccagaccacattgtttgtggatttgtggaaatcgaggacacaacacaaataggggttggcgcaatagagttagagatgctcaaaactactaacaatacagacgggtcgatagacctaactgccagcaccagaaatactttagtcaaccaagacctacgcaacgctcgagcagcgttgtcaaggcgactttacaagattgttactgttaacaacgggttaacatcagatcaattattctatttgtgtcaaaacaatatatcattcactctggtgcaatcgaggtcaaccccgaacccacacgccatgttggcttcagaaaggaagctagcatggtacaattttgtggagcgggcggcgactaatcaactggtgatcgatgtgggtgccagatacaaccgagacaactaccactgtaccacatggcacggcattggaccatgcttagattggagagacatcgaaagatatgggtccaaacctctcgagcctaatacatgtagtcataccctcaaaacgtgcaactgctcgtttccaaacaacccattgatagtgagtattgacagcttatacgacgttgcagcacaagaagtggtgggattcatgaaaaggacgggggcaaaatatttattgttctgtctgtcaacagcagctattgatttcacgagtgcacaaggtgcgttgttgtataatcagggtgaatggtgcagaaatgggaatagcctcgtaacatcacttataggtgatgacaagccatacgtgaacaattggtatctgtcaaaaatgtggaccactgcagacgagatacatgttggtgatgacgttgtgaacattaaaacgtacagcattataggcaatcacatactacgaattgtgactctgaatgagttgtctaatgtgctcaaaaagcaaaaactgtccacacagcaatctgagcaaatggttactatggaaataccattaatcaaaatagacagttggttaagttcaattcatttaccaatcttggtcagggaattggtcacaatagacgttggattgtaccagacattatatgcaagaaatttaactggtaaattgtcatttgagaagatggttgaatttggattggcatatgcccattcgaaatacacaaccgccaccacaacatttcatcaaaaacatttgactgccaacgatgtaagattgcatgcaatgttagccaccattgcaaccagaagaaaatatgcttgggtacaacaagcaatttccatgaatgaaccaaccaccttgttaggagtggatcttcaggccggaacagtatatgggacattagaatattgcaaatcaataatcactgaatggatcggggaattcctgaaatcaagcaattgtacacactccaaatgggtggccaggttggacaaagtcatatcagaatggttggataatggcttttggacagaattggaacaattgggaaaaacatcccacaaaatcaatttcattgaataccgggacccagtacaacctacggcagcttccacacaagcagcatatttgtgtaatcaccataatgtttcatgtgaccacatggttccattgcgagacgcatgtgtgtgctgtgggatagtcgaggtggtgggagacactgaacattgtgcgtgttgttcaccaaatggatgcaagcatgactgtcaacatatgtgtcaaggcggactgtatcacggaccaaaacaagataggaaggtaaattgtgagtgctgtggagtactcagcaatgccaatagatgtggaaactgtataatgacaataagtcaaaacaagaaccaacaacaacctccaattttgcaacgtgatcttgctgaaaagcaagacgatccaactagaatagcaaaaagcaaagttccaaaaccaaaaccagtgtttgaaaaaccaaacgtgataagcaacacagcagttatgccaatcaaaccaaagaaatccaaagcagtacaagcagtcccagaactaatggcaagcgctacagcgagcaagacaatattggaaaaatggaaaatgggctcaattgaagacaatgctgaagaaaatattccgctatcagccgacaaattgcaacctagccaacaactgcatcaaaacccggacaggcagtacaggatcaaagccgtggaacaagtgacaacagccacgcgatcaggcgaagacagtggtagtgaaaccggggaacaacaaagtaacgaagaagctataacattaataactgatgatggggaaatagtggttgtggatccaacagcaggcccatcagaagaacacgccaatgcaatatggcaacaacaagagttggaccgacgtcgtcaattcacactgcaagaatcagagttaacagtggaagacgcggcaacactggaagtgtctaaacttacaagcgtggcttacgcatcggtgctacgacatggctggcaggtgtccattgactctggggcactgagacgaccagatgcgaatccggcaaacacaccagggattagcgagtactttttcgctcctatgggaatatccacaatagaaagcaatctgttagcggttaccaacgtgtgcaaggtgccgggtgacggattgtgtggttggcacgcaattcacaaagcattgggttcagatgcaaacctaattgacttacaacaactgagtggaagggcggattggtttaacaatgaagaaattgccaactacttgcggagattggggaaaaacagcattatgctaatgcccggaacgtcagaagtaaacaaagttgacccgaacagtaaccagtatgtagtgatacgtcatgcagaagtggtggtgaaagaccacatgcactgggaaccagttaatgtggcacagctaggggttggttcacacttcccagtatttcaagggtgtggtactggtagtcagttgaacaaactagaaaataagtacaacataccgtttgactgggaaaagtccggggtactacaacgaatgaatatggcaaaggaattgataaagttgaatttgggcgtgagaccgctaaatgagcagcaaaaatgtgaaattcaaattgtggaaaaagatggcagaaaatggttgacaaacaaccgtaggttcaaacactaccctaaaagtggattggtttgtttcgaactggacagggcattaatggacccgatcgaaaaaatggtaagcatggaaaccatgactgcaagacaaatgttgtcaacagaaatttataacatgccaaaatttgcagatgcggatgtgcaagaagttcgactggcggaagttgtagacacttgtgcaacaatacaaaaaataaagcatgaggcctctaatttgtccacattgcaaagcgaatcttgggagcgatttatggtgacggcaacgctaatgtcagacaaacggatgagaattgacattacaaaccacaaactcaagagcggggatttggtaggtgtaagaagtccggcagggatgaaagaaagttatgttactgtcatcaacaaaaatgtgtttctcgacacaccacccacaggtcagatgaaaaagactgtgttggaattatttgtgcccaaaacatcgtatcacagcaaattgctaagattgatggcactacaaagaccattaccaaagaaacatataatcgagcaacgattgttgagcgcaactgccgtaactggaccaggaggtagtggcaaaaccgctaaattaattgacgaactagatgaaaatacaatcgtagtagccagaacaagaatagcagtgaacaccattcagacgagagctccagcttatcgaaatcgaatattcacatacgaaaaattgctgtgcgatccagtgcatgcagagacactgtgtatagatgaggccacaatgttcaattggtttgacgtggctttaatgttaacatccgacataaagaaaattttcttgtatggggatccccatcaagtggggcttattgacagctctgtgttaggtggcgacagatacctggaaccagtaacagaattagcgaaaaacaaaatacaactgacaacaacgtacagattcgggaaaactttagccgacatcttggctagcgctggggttccaatagtatctgcaaaagaaaccgacacaacagtggaactgatcaaatgggaacaattcaatgacgcagaattcaaaaaattagtgaataaggaaaaaccagacataatattaacattttaccggagaaataaaagagaattagaaaaattgaccaacacaagagttgagacggtgcatgcttatcagtcttgtgaggcagaccgagtactggtaatgcagatgccaacattcaattcaagatcacaaatgtgggtgaaccggtcttattgcatatcggccgccactaggccaagggagcgtttgatatggtgcacggttaaaatgcaacaacgcacaacactagccaatattttgagcggaactgcagtgcaaaatttggtaggtggtgcatcagacgaaacactagaagagttcataatgcgcactggtggtcaggtgggaaatgaagacataagcgaggtagaagaagaaccttacctgccaacaatagcgcaccaaccagttgagatgactgaaagaaagtggaaattaatcagatcgccgactgtagaagagattgtggaaattgcaaacagcacgttattagagtcatacaattggaagggttacgggcttcaagaattgcattcggccagccagtcagtgagtcctgagaacatgaaatgggtattatgcgaagactgtgtggtgtgcgaacaccctttaggaaaagtggtgtttagattgattgaagatgataccaaaatcactatgacctgcagcaacagattcctgagttgggcagcgaaaaggcaggctaatcaattgtatattgaagcaacgacaaaattcctagagaacgctttggagaatgatgataattgtaacaaatggttaacttcaataaatgcctcaatgcggcaaatagcaacaaaattgctatgcaattacataactcaagttgactctagcgaagaagaagctgagagcagtaaaacatcctcttgttcgcactcaactgccggctcaccagactgtagtcatacactgccgtcaactggcaaactgtcaacaattgcggaatctcccagctcgcgggaggcctcaagtgatggcgacacagactcgtccaccacggttagagacacacaatcaagcgcattggagtcaactgaacttgatgcattgcagtattcagatagtcaggaaccagatttcttaacagccagcgaaggggctgcatcagatgacaattacaacacggtttcagacactgatggtgaatcaactttggatgaaagtgccaggtcaagtggtagtcaagaagacacatttgaatcaatggagcacgatattacaaccgttccgcgacgtgatagagaaacaacaaacattgcacaatctgacagtgaaattagcattgaaaatgatgaccgatggttcaataccagaacgggtgatgaagagcaattggaacaacaataccaggagaacatgcgagttgacttggttagtatggaagttactaccaggaaaacttccaacagaattgatacatactatccgataatgacagggttacttagtcaatatgttgacatggtaatgtgtgactcaatgaccaccactacatggcacactgatggtatgactcaagtgttggaaagttgtgacattcgtggaaaaatgttagaaataacattgacagacgaaaacatgacagtagtcataacctatgatggcagtgggggcaaactgacagagctaataattagtttaatagacaagtggaaccatgcggtgctagtggcgtttagaaataacgatgtgtggcaacacatgactaaatcacaaaaagaaattttgaaaaatagacatggaatggtcaacccggtcgtgcgagacttgggcaacaggaaatatacattgaaccaactgttgttggagatattggaaaaacacatagatgatgaaggaccaatcactatggatgacatagtcaatagaggagaaatgaaaaacaaactgggcaaatcagaaacaaatccgctgtatagcgcaattaactctcaccattgcaatgaagccgaagcttggtggaacacgcaagacgtggaaatggatttagtcaaagtgtcacaacagacaatgaacaaaagcaataacacttttattcgtttgttggcggaacaggtgcaaatgctggagacttgcaacttgcactgcaaactgtcattgtggaaccaatcagcaacaattaaaacgtttggaggatgttcactatgttgtggattgagtgtcgagaatgagtatggggtagtgttgaaaatttctccacaacgtaattggaaccgcagaagaaaatttttactcaacaccaacaacgatatgactagtgtgaacttttggagtcatgtaataggaattgaaagtgtgtggaatgacaatgtagattattcagatttgccactgaacagggatctactgttggtggagccactgaggttggcagaatatgaactgggcatgatattcgaacgcattggggccacaccaaaaaatctgtacaattacgtgatggccagtcatgaggaccacaaattatgtacgtattataaagaaatcaatgaacaatatcaaacgaaggtaaatgcagcacttggaacaaattacgtaccagcagctaccaacagaatgggatcccacaccagtgctgacggaagcttgctacaatttattaacaaatccacaggcagaacattgttggcccaattagtggataacaagctgcaagtgctcaaaacatcattggtcaaaataaatgcgctcaaaattaaccaaatgttgataaatgtcgcgaacagtcgaatgaaaagaatgccctggagactggctagaatgacggtgaaattgcttaagttacacaacaccaaatttggggcattagaagggcacgacatagaatcactcaacttgcccatgtcatatcacaaggctgaaaggacaggggtttatgtccattatagagaaaagctagaagcgacgatgttggcaaatatgaaaaagacgtttcacatagtgttcgtacatagtaagcagtttgacaagtacaaagatttgcttaaacatgaatgccaaaatttgccaatagaaaagcaaaacttttcattggtggaacacgggtttgatcaattagtggaacagatacactacaaatatatttataatgggttaagcaaaaatagcaaagcaatagcgatctcagatttcccttacctatcaatgttaacctctgcttgggctactcatgtaagggcgttgtcacagattaaaaatgcccgatatgtaaggaacctgctggacaccgaaccactactacggaaaataatacaaatatttggagacaaaaagcaagtgaaagaaaatgatggtgcaacagaagattactttaacgaggtacatgcagcagctgtgtaccaagagaagtacaaaaatggtccatggtttgctcgcaattgttctggcccacaacaaaaagtggctgatttgttgtggatcggactgactggactaaaaatgtcaccggaacaactccacacaacaatgtgcaatggtcagtacaaacgggtgtcaatgctggtgccagtaaaactgaacgacaaaaacgattattttaaagtagttggtgaagacgacgcgacatacacagtagcttatgacgaatcagaagaattaacaattataaataaacaattatacaattcagtgatgagcggacaacccatcaaagtgggaccacattggttggtattccacagcacgaacaacgtgttgggtcacagcacagtcaatgtggtgttgtgtggtagtgctgcaatgctgccaaactatacaagaccgttgagtcagtccaacaatgtgaaaggggtgcagtttcggatcccagtaattcatgatttgagagctgcaattaaaaacatggaagtaatgaccacaaaagtggtcacaatagaccacaaactgtatcgttctctgtcactaagaatgttaagaactgagaccaccttggatgacttgctagcttatgcaagagtgaattgtcatataatcacgtacaccaacaaggctactgggcaaagttatattcgaaatccagacggagtaatggaggcatgtgcatgcgtgtattatgaaaataaaagggccaacgactcaattgcaaaactgaccgaaatattgactcaatcatacaccagaaagttgtcatttagcagcgtgaaagacgtgatcaaagcagtgggtttaaatgtgttagcggacgtgacatcattctttggatcgaaaattacgattgatgaaattctgaacacaatcgaaaatttagtggatggttcagcaagcagatttatacggcatttgaacaaattctgtttcgttaagctaaccaagaggattgagtaccccaaaattgtttacagaataggggacacagtgaactccaccccgagcgtggtaaacgcgatggacccagttctagcgtccaacatgctcaaagccgctgtgggaggggtgtacaactggtatcaatccataggttgcaacactaatccagctgaaaactacacgaggcgacgggaatcatgcatttccgcaatgtgtagaaagttggagcaatacacaggcagcagcaaaaaggaagcaatagacaaagtcgcaaaaagcatgttgcaaaaatatgatttgcaaacagttgtggattgcgtgaggaaattgtttaacaatttgcaagatccaattgaattgcaagcactaccgaacactttggaacagttgagcgaattaacaaactgtgatttaactccaaaggcaaatattaagggaagaatgagacacaccaattacacgcctgaaatgttgagccgagagacaaacatatgcagctggatgtatgaagagcaagttggctttatgcaaggcaaaactgtcttattcagcaccataggttcaatgggagacgtggagccatttctgggtgtcgcaaactggtggaaaaaattcggaataaaatgcatttttgcaattccagtagcactgtgtgatcatgtggaggcacagggacatcaagtgctaaaactaaatgtaagcgtaactgacctaatgtcagcatgcataaagatggaagaatctaaatataaccttattcagcttgcaaaacatttaaatgatttgatggtaacaacaagcagagtgttcgacatagaattgaatgattggaccccgatcctacaacaagtggatttaattattgaaacaccgttcactcatgtagcagcccaactggctcagaaattcagaataccattgataatttcagctgcatatccatgggaatactccagaatgacaagtctcaagatgcagccatgcacattatttgatatgttgagtggagccatatcatatacaccgtttcaacataagttgagccattggagaaggactgcattagagttaaccaatatgcgaggtcaaatggtcttgttggctggtaacccaatgcttcagttacacgaacaacccaccacagtgtggaaattggggaactgcacctcagtggtaggatattcattgcagataacaaaggatatgcaagaaatgactgcagagcacttaaagttattcgctcataacagggtagtagccgtgtgttttggatcgatgtcaaatgaggggtttgaagaatggggacaggaaatatatgagaaattgatgacactgttcgacgtgatagtgattgtaggaaaacgatggaaacttaagttgagtaactctgagttcccggtgatagcttacgattatattaactatcattatttactgccaatggtggacctggtggtgacccacggtggtagtggcacaacgcacaatgcaattaggcatggttgtgtcgtggccattaaacccttctttggtgatcaatttgcatggttgcaagcaacaaaacagttgggcgtcggaatggacacaaatgacatgttagaattagatacaaccaaactagacaagtacaaacagaaagtgaatgaatatgtgagcaaaattgaagaatacgatgtaaatgccaacataacagcatcgttttcttactacttagaggtgggtcgaaagcatatagagggaattgtaaatgatgaagcaataccagtgaatgaaatgatggatttcaattgtgacaggttgtgtagactagtgaccaaccagcgaccaacaaaatggagtgactatgatgatttggaagcagcaacggagttggccataaacgacgtaatggagtatgcaaagcacagcaaagttacgaccaaggctactggcaaacagaagagcaggaaagaggtgaatttagccctgccggaagtatttgcatctgaaacaataactaagtcacaacaaaagaaacgaccggtcacaaaacaaacaattgtgaccaacgtagatgaaacacgtttgaaaccaaccgaagaggaaatagaaatggagaaggcagttcaattagtgaggcagccaaaaagtaacctggtgcaagagttaatcaaaaaatttagccaaccagccgttagcacagccccgagtaaaaggtcaggctatcaaaaaagtaacaggaaaagcgttaagatacaaagagtgaagcataaaacaatggaatttattaagaaaatggcggctgcagaactgggaccactggaagaaacgtttcctgcaacatcggaaagcagtgggcaacaatcattagaaccagaaaaagtgagtaacatcatcgaagcacaattggatgaaagtgcaactgactcggaaaaacaccgcacagcagcagcccataagctcagctcagagcgcacaaccatagaagacgacttggaaaaattattgaggccaacagacccaattggttatttgcaaaacacagggtcggacacagatccagaaagtgaggaaataatcaacacttacatcgaaaaaggaaaacaaccagaattaacagaaaccgcaatattatctctatggaaaagcaacaaaacaccaatgcctaaggaggtaactcataacagctcaaacagattcggtctactggacagcatgactgaagaagagacagagtcacagtcaattgaacagaaatgtgaaagcccagagcaaacaaacaaggaactgatggagtcaattccagaactgcaatctccaaacaaattttccataagtccggtgacttcaatatgctactcaaagatagcggagatggaaagttctgatactgacatgtcagatgagtccaacgacaaaccgctacgcaaccacttaaaccacaaatggcggttaaaattcattcgcaatcaggtaacatgtattccagaaattaattgtgggtcaacgtggaacatcaaatatgatgattgggagctggagtataacccagaaacaaccgacacatgtgtgtatgaatgtgccaagtttatctgccgaacgtatggtcacaccaaagtggacaatgacactgtatattactggtgtcaaagattaggaattcgcaacaagccaagtatgaatgaagcgcaaaatttgttccaattgattggactgcccactttctttataactgacagcaaaaaattgttactaaactcttgtggccaagttccgtacattggagtacaactaataattgaaggtgggataggacactgcaggatagttaagctgcacggggtgcaattactagataaagtgatgactgaaaggcagccgacaatgagcaaagcgttgcgggacgaactagaggcaaccttagctccagcggcactaacaattagcaaagtgcggaggcgactgttatgcaaaccagaaaattttgcgaattggtccggcacaggcactccttatatgttgcaagaattgcaggcgaaacttagtatgcgcaacttaagattcactctaacaagaaaattcaagccggtacactttgtgaagtggaaaatagttggaaacgtgtacttggctgatggaacaaccgagaagttaaaacatggagcactagtgttgttcaggcgaggtaatgagtacctggcaggtctgatagttctaacatgctacggcatggtgatgatacccatgaattcggcattttcagacgaagaagtttgtgaaacagtggaaacggaaattaaagtgatgaacgaaagaattattaggaaaaaaataattaaaccacctggtggattagaaacggctacatgtctaaacgagataactagatcagccctgttgtcaaccaacccagaaattgtagacgctacaattaacgacgagagcgcctcgcatttatttatatatgaatatgatggaagggcacaccacaagtatgatgaattggacattattaaaagatttcacccaattagcattcaaggggtgggatatgacataaaagcagaatggctagaaaaattgctagctccacatggcgcggttcgctacacattgcagcgacaaagactgaacattgtggtggagttccagactttgcaccaggccgcagtatttgcgtcagttgcttcaaaaagttggccaagtaccatacaactggcgaagcaagtagtagtgtcatgggacgaggctcaatccacaggagaaaggtggatagaaagacatgcgttcttgaacaaatgcgagcgtggtgtttccaaagagcacatttcatggctgaccggggcttggatgacgttagatcaacaacaattggacaccttaatggtgacaaaagaagaagtggaaaatgtgtgtggtgctaaattgcccgatttgttgttcagaccaagtgaaaacaagcgcattactggactggattatgccttcttacccccagacagtctgtacagattgccccaactaagagtgctatttgctaaaaagagcattattttggagtgcaagttaacaaaacaaggaggaagcgaagaattggaaaatagagtgacaagcaaactacctgacgaattcaatgtgaacaagcacacaaggtggtgggacattcacgtggtgaaaccagaaactcaattcaatatggaattgtggtcaaacagaataaacacagaagcaattatgggagctctggacacaggcacaggacctgaccagttggatgttatgactccagaagccggaattcaagaccatgtgttcattcacaacaaccccactgaatggccagaacacaaaaatgacggaatggtggcgatggatgatttagactatcaagacatggccatgtggcatgacacagactttacagattggaatgaaaaatttggccctaaaaaccaggtggatgtgacaagccgaaggatgccaacggagattaaaaccagtcagaaagccacgatggtggaatacccgaaattttcaagaccggtgctcaccaaagcagccaatcaggaattcaatgctgtaacaggcaggttgtgcagaagagaaaattatagaaaatatgggtacaaattacaggaggaagtgtggttattcatgaatgcttattttgaccccaccaaacatgacttgttggattattaccagtgtcatcaattaagtctcaatgatgggaaagtgttggattggttaagagacagaccagatgctaacaaaatagctgctgaattggaattaattcttagtgaagggtttgaggtgcacccaataaacaacataaacgtgcatttaaaactggaatcactattaaaagaggaaccagccagtgatttaagacaagtgaaagcaagagctttgatgtggcaatgcaaagggtactgtgcaatgttctcgcatatattcaaagaattgaaaactagattaaaaagtttgctgaagccccacataatttacagtgacgggttgaggggagacgagctttcatcaatggtgagagaagtggttgattttacacattttttcgaaaatgatttagcacaacaagacagacaaactgaccacgacacaattaattttgaaatgcaaatttacaaactgttgggggccaatgttagtgtaataaatttatggcacaactgtcattaccactggaagtacaaagctgcttcagtcatgggtgtgagagacgcaatgaggttgactgggcaagcaacaactgccttgggaaattgcttaactaacatgttggtgcacagaaagctagtacaaacaattggggaccaactaagattgttcttagtattgggagatgacggattgatgttaaccaatgggcacatcaacacggagtccttgaacagagaactcaaaagcaatcacaacatgatgtgcaaaccaaaatgtaatatgcaatatgggacattttgctgtatgctggtggctaagaatcacttgggttctgcaacgctggggccagactttgtgaggttgaggcgcagatttgaagtaacaaacggagtcagtgaagctaatgatgaaaacttgcgggcaagaagcatgagttatttgatgttcttaggtaacattccagaagccatggaattagtggagttggaacaaatgccaattgtgcctcaaaagtggtatgattatgacacaatggtggaggcaatgggcataaaatacggaattaacattgatgacgttgagaataacaaaaaccagctgttgaaaatgattagagagaagaaaatctttatcaaaacaatagaccattggtttgaaggattataa

SEQ ID NO: 1219 - DNA, 15525 bp, Fagopyrum esculentum endornavirus 2
  source 1..15525: mol_type = other DNA
atgcgtaccgcacggtcgtttcgcacaaagcaaggagtgctcttttttaatgccactagcagggccaaaaggatggtaaccccgcttgataatgatgcacacaatatcatagcggaaatactaaccaaaagcgaactggaagaagggagaaactccgaggaaggaatttctcccgatcgtatgaccgggacagccaacatgatggatcttcagttccttctaaggcagctccggacagacaaagatgcagcggagaaatactatgctgttagatcggatttcaaggtggatatgggctaccatatcggccaggaccatttagactatgcctgggagatcatgaacgaggtggtcacctgcaccacactgattttagacctttatggtctgtacagatttatttacaatgcgatcaaagacatgatatccgagatagggtcatggtccaaatgcttcctgatggaacaggaagcaagggccaggctgggtgtcggtaaaaggcctatcgtgggcttcattacgcaggaagcagtcacccatcacatggtacaaaggaaaagacacggacggaagtgggatcaacggtacgggtaccttgcgtgcccacattgctcgagcttgaatgtgttggatgccgagcgactcggtgtcacacacctcccactgaatcctgacggcactgccaatttcccgtcagccctctgcggatattgccataaggatctcaccgaagccgaatcaccacactttgattgtcacttatcaccagtacccaggtatgtgagcggaacggtggggtccaagatagaacagagtctcctgttgaacaggttggggctcagtccgcccgaagccgcagacgccatcctagacgtggctgaatcacatgatggtagaattgtcacgagccagatgagcagacttaacctcggatcttgcgaaataccaccaaatttgacatcagagttccgggtgtccctcaattcagagttccctgacatagagttcgtggtccgaactagcatgtggtccgccagcccagagaccaccgccgcaataaacgcaagcatgacacaaatcactaaaaacgtgataggccacgaggtctactggccaaccatcgaccagcagccagtgacgaaccgtgttcgctgccaccatccagcgaaggactgtggcagcaccgattgcgaccactggtgtggtcgcagcccagtgatcaccatggaaactttagccctaggagccgaagcagtcacaaccataatatccaggactgaaatggctagctatgttatactgccagaggctggatattccccaaaaactgaaacagggaaatatagtggcacaaatgaccactacatgaacagaggcggcatggtgcactatctgaaagccgggatgaattcgccttatagcatacacggcagcacttttaagtcactgctgtattcagatgttataaacatccacaaaaaacagtacaggatacggacagtactgcaagtggcacacatggtggtgagagaggtaatgcaaatggataggaccgctgaactgataaccccccataaacccaccagcgagttgaaggtccgtgagttcacaatcccggagctgaataggggggcattactagaactcactggagcagaaatagtgaccagaaagaaagtaagagtagaggctagcctattgcatgccctgatggtcaggaacataactggaacactcagcggaaccgagctgttggattatgcaatggcatttgcgtttacaaggtacaatatagacaaaagggtgatcagttaccaacacctgacaagagaacaagtgcaggatcacgcatgcatagcactcatgctcactcgccgagcaaggtggaaagtcgaaggatctgtgaacatgctaagactaaccggagcggacgctttaaagaacaagctctttacgtctttgggccacatgttgatattcagtgcacaggaagtgataacgtccacaaaagctgggaatctgatcgaccgcgccgcacaaattgccaataaactagcactaggcagcatagacatggtaggagaagacccagtctgggacgaattggataaatggtgcgcgaaggtagagatgggcaaagtgagcatcgccgatgtgggaccagagcacggatcaaaaccagcggagccaggggcagaggaaccggggagttgccctcacacttgggcgacagagcccatcgggagcgagaattgcgagtgctgtggcagacggtgcacgggccagcactgcaaagactgcatggtggtagaaaacgacagccactactgcatgcacgaatgcaaccaaaaccacacaggagacacaatatgcctatgctgcagattgccctcacagacgcgattgtgcaggtgttgcacgatagagtgtgaggcaataccaatgttcgagccaccccccaaggagacggatggggacgagatgagagagggagtaagtggccctgccagacgagtggcgaaatcttggccatacgtcaagaaggacaaggacacacagtcgaacgccgacaggaccgtatcgcatggtaagaccaaacaattgaagaaaggtagtgctaagaagtttgatgatcccgaagtcgtaataacggtggacaacaagagggacttcccagaactggtcgcgaagccagaccagacagaccaaaccatactgaaagccggtgaggtagaaacacccattcaattgccagcaccagatcaagggcaaccaccaacaacaaaacccagttactcagacaaattgcagggagcacgcccaatgaaaacacacaacgatgatgaagaggaagaagaggaagtgacggaaacgagcctaaagaatagagcaataatagagatatcagaggaattcctgcaagcgataacccatctggactcctggccgggaggaacgggcgtgctagcgatgagtggcgaaaaaccattcacctctcactgcccgtacctcctccgtgggaccaccacaacaggcccaggttacttcaatccaaattccaccggagtgatattgaattcgatcggcacttgtgggctagacgccctaaaagtcgtttgggacatgaacttgcccgtggcagagatggaagccatgacgggttccacgataggatgggcagccgatgagctgatcaccgtggcgaagaagaggaggaaaaaccttttgataataactgccaacgaaacacggatacataaagctgagtctgggtgggatatgccgaccataatacattccagtgccatcaaggacgatacaacgaaccactggtacccagggagcgcacaaatgatcaaactgcccactgaaatgataggctgtaatgatgtggcagagacggcagtctacgatagcctaacaagacaggtaactggtggccagcagcagacctactgtccgagtctgatgaccatatcagaacgcatactagtaaacctgggcgcaaaaaccgtaggagacgaacttatagagggaaatgagaacatgatgaactttaaaatggttgaaatagacggaaaagagtggctgaccaataaccaagaacgcgagcacaatgttatgatgggaaaaatacatgtggaggtgaaggcaatgtacaagcagattgtctcctgcatgtgcgtagggtcaagtggtgtgctggcaaacgactgcttgaggccgcgttatgacagagacccaggccttccacatgacatgacgaattacttggtggccgagctggcagatacggtacgcaccatattggaggtaaaatggtttcaccacaccagcaacccaaatagcaaaatcaaactgacgcaggaaatgtgcagttgtgaaccaacaccaaccggcgcactggttaccttcaacaatccgggaatgaaaacttttgacatgataagtatcaggacaaagtccacacaagcaatggtgccagtgaaagtgatccaaggtaaagctgccgtacctgtgagtctgaccgagaagaaaagaaacatgcaaatcggccatctcaggttgagcatcgggagcatggtcaggaaactagtagccatcctcgggactgggccgaacatgagcttgactagaaaactactgaccgaggcaaaattgaccctaggcccgccagggtcaggaaaatccacggaattggcaaagaccgtcggaaaccacgatctcgttgtggccggaactaccggggcaataaactcgataaaacaaaaaggtgtgagaaactatcaactcatgtccctggagagagcgaaatacgaaggctccacatatcaagtggactgtcttttcatcgatgaatgcaccactgttggggtcgtagacgcacacattctactgaacaaaataaagccccaaagagttcatggattcggggacgtagcccaaataggttacaaggacatgatgatcacggggggggaaaggtatgaagagggtatgcataggttcatgggcaacacgacagaactgaacacaacctaccgaatcggacagccccttgctgaagagttggcaaaggtgatgccgggactgacaagtttggcaaaccaccccacggaactggtactaaaacaccagaacgtgtacagccgagacatggtcatccaagcagggtgctccgagaacgtggatacaatattggtgttctataagaaacaccttaacgacttggcgaaaacgctgaagaccataagtggaggcagcacagacatggccctttgggctaggagggtcaggacctccaccgtccatgcttaccagggtcaagaggcagacagggttatggtcatacaacaacgattgaccgcacaacctgggatcgaaaccgaagaagagtactgcctgtcagcggcaaccagggccaaagagaagctggtgtggttgtctgtgggggcattcaacccaagcaccccactagccgagaggatcagagtgggaccaaagcaggcaggctacggcctattggcatcactggaaagcaggatcagagccaaggtcacaatcccggttgaggaaccagaagaagaggacatgataatcgtaatgcaaacactagcagacacgagcatcaagttgctcaggaacaacataaagagggattatggaatgtctttcaacgctataataaaggatggcaagacaacggtcaccatacaaaagtggaagctcactgtcatagtgcttgagatcacggctgatggagcaatcaagataataaaggattccattgataaggcaggagagctgacaaaaatgatccggctgatgctggaaccactcgagatgacacagtcgcgttgcacgacatgcaaccaactggacctacacacatcaaaatgcccgcagacaccatacgggccggcaatagtagaaaatatagtcagaatgggaaaactgtttggagacctgggacaacagctaaaactaacaatctcaggagttgagtacacgtttgagtcaactggttcttgtgaccagtgcaggcgggtggtgatgcacgccggaaaagacttgatcggggaattcgtgggccaaagcttaaccatggtagcaccaaagttcaggttgcagggcgatgaccaagggctggggctgacatggaagagagtgataaatcgggggccaagcaccgaaattgagcatgatctcctggaaagcttagtaaccatgggggtcacgggaaacacaaactatgtggcaacgatcctggaaaaaacccacggcctgatgcaggcagggaaaataatggtgaagaaggctttcgaagacttctttgagacccccaccggcacaactgcaaacccagtcagaaactggtgtttggcaaatgggttaaactacaagagtcatgtgacgacaagaggtcagcacatagccttggcgacacaagcaggagtaactgttgtgtgccacactcaaactaacactatagttgctgtcggtgacaacatgatgggctcagacgccaatatgttcgatctcgtgagaagagtgctaaaacactcagcattgaacgtggcccacaacttcattgccagacttctagaaacaaagaaaattgcaggaagaggaggagaactagaattcacaggcatgcttgtaggtacggacatccaccaaaaacgtggcacgaaagtgtggcgaaatctgttgcagaaacacgttaaaaacactgtagccaacctcaggggtgaggaagataaagtatacttaactcgcgaggaggtatctagaatgggcccacttatccaaaaattcatgggtgacattcccgtcggtatccatagccacatgatacccattgatgacggagggaacgcagcggaacaattggtgagctatgtaatttacaggaatccttccacaacaccagatttcacagtaacaaatagacctcactgcgtgtcgttcaactctcatgtgaacacacaaattgtgaggcccacatggagttcgaacacagatatggactggacagcgaatctcaacattcacaagcagtgctgccagcttttgtcggagtgcataaatacgataagagaagaggaaaccgactgctctaacgacaacaagctacccgaaccagagatcacgacgaaaaagagcgaattggcatcccggtgcctgcaaaataagccaggtaagtggactccatttgaaggtaaaatgagtggcacggtgttgctgaatcactattggatgaccgcctcagatagagatttgatcgacttgatcaaatcacatgaaggggtcaggttcatatgcacttgccctatgatgagtttagaaaaatatgatgaagttgaaacagctaagggggaaatgatggtgatcctggacaagaggaccggagccgggtactactgtacaaaaaagaatgttgaacgactgagaaacgggtggaaattggaagacggcgagggaaatggctgggtgttcaaaaccctatacacagtgctcacctgcgaggtgatggagatcacgaagttgtcccgaccgggaccaaatctgggttatttcagtccagtgaggatggaagacgggttaggattgacgcacgtagaggttccacgaatcacaacggacccactcacactgatccggaccggacagcatctggagacgatccatctcctcgtagataccaggttgctccagagcatgatgaaaagaacactcagacaagccaccttcgatgaggttctacaattcgcgagagtgcatgcaaatgggatgctattctcaatgaagggtttcaaagcacaatccacggacacaccacacgacatacagtggttagctggagcggtatatgtagcaggaactcagcagctagaaaagttcgagagagtcctggaaatattggaggtgaaagaggctcagtacggactggatgccatagagcgactgaaatccagagtgagaatggtggggggaggcatcaaggccgaattgacagcgctagtcggtggcgatgcatccatcgaggatatagccacataccttctagacaacaacataaagtccatgcagccgctcagagaactggtgagatgctggaaggcgatgaacgtgaatttcggcaacagtctcaggcgaatgtacccaaggcctgacaatcggaagaggccgatcgagctgacgccgggtaagatcaattcaactctggcaagccggctgagagagctagtttgccaaaacgtgaaggtgttcgtccagagcgcactcagacaggtgactggaagatcaaacaggattagagagagaaattacaagcgacggggtacagaaaggttaaccgacgacccgaacgtgagatcgggtgaagtctacgaccccaccctgctataccgagacttcaaatcgataatatcggataaggtgtgtgcactcagggaatacctcctggagatcgagaactcctgggatcgcagaatcctccaagcaactgacaatgaaagaattaccgtggcagagatcctgcagtgcattcaggtagacatggtcgagatggggaccagcataggagagcaaaaccaatggtgcaagataatagaccaacataagttggtgcagggtcacttcacaaatgaagacgtttggaaatcacaggtagttaaagacggactgtccaaactactggcacacgctagactcaggagaagcggaaaagggtcaccaacgatccttgtccatgcagtgggaagcactggagactacaagttttccgcgagtatatgccacatcttgtcgaaatcaggagccatcgtggacgcgttcgtaccagcggacggggcctatcactacgagggaatgggcgtcaggaaaatccacaccacccactacgacacaagagcgaaaatggagtcttggaacaaactgcaagagctcaacatggaagaggcaatggcacaactagaacagggagctgaaccactcagaatagatcactttccgcaagaagtgctcgatgggccatacgacttggtgattggggccataacagcagtatacgcccagcatatagcagagaagctaggtgcagcatacgtagagtgcaatgcaatgccggagttcgtgcgggatgcccgagacacatggtggaaaagcacgggggttgggcaagcagtatccagtgcgctgaatgccaacatattcatcgcaaacaacccaggcatacacgagttcaggctgaaccaaaacctaccggaaatagacagtacagagtggggtctgtgcccaagacccaatgtgttctgttacgaaccgtgtatttcaacggggccggtaagcgggaattggccggttataggttatttgggcagagaactgatcgttaagcagacggagcaagaggaaatacaagtagactacctgttcacgatgggctccatggtgcatcgaaacatcgtgggtttcgccaaggaatttgtctcccaagtgggaaaaagagaatgcagggccctaattcttggcggatacttttcaacggagataaaacaggcattgggagagatcatggagaactttgtgcctgacgtggaactccagcacggactgggaaagttgatatacaaggactgctactcacacgataaggtcatgcacgaaggcaccattgtcatacaccatggtgggtctgggacaactaaccagtccttcgtgagcggatgcggacaaatagttatcagcgttgcgtttgatcaggattactggggaaagcgcgtcatggagaatcacatcggagtgcaaatcaaagtgcaggatgagccagcagctttgacagctgctatgaattggggtggctggggaaagacattccaggtgttgcggcagatgaagaggttcataacaagaaacgtagcgaccaacctgatcagggccataaagatggttgttgatgaaacgcaccctgatagcaaattggtacacgacggactactcaacacattaaccccggtgaaagacgaccagatttttaccaggccagcagaagcatacaagcccactgctctgacaagacagcaggttatgtacaccagcgttgaccacgagtgcacaaagcttgaaaattatgataaactcaagaaatgggctgccattgtgatgcagttcgagggtgtgagaccagtgccaatcagaaggctctggcattcatgctgcaacaatcatgacagtgacgattttgtattcgctgaaacggacactgtgtacatcacatactacaaagatcaacaaatgaaagaatgggttaattacaccaccaaagagcaccagataagtcagccagtgctaccattcaagactaaccgtggaccaccagggacggcaacactaccgttccatgcacacgggcaggttagggagcctggcctgccggaggagaaaagattggaggtcgtcaccttagcaggtcaccaacaaatcatagatgaggaccgctggagagaaatcgcttcgaaaaacgccaggggcccgtccaaggataggaggggtaagggtacaagccgtgaggtcatgtgccaggtgtgcaaccagcgcaggtgggaggggatggcagacacactggtctgtacgctctgcgtagcaaaggctgaatttcatcaagaagggatggctgagcttagtactgcgcaattgaccacctacaatgcaataatgctgggggaggagagaccactacttaactaccttatgggcatcggcatctcatgcgaccggcgagaagataataagcacctcgagcctgggaagtacacggtgaccccagggcgaataagggtactgtacgacccgcagaaggaaacaggctgcgtgagagactgcataaccgcttacgcttctgggtcatctgcatcccggaaagtatggagcagtgggaaaccagttcaggtaaaggggagcgcagaggcagcaatgagagacaccctaatgagacttaaactcccatacttagttgatagaggaaacctcactgattatatctccacaatcggcctaagccatacaatagtacaaggggagagggcgatagtgaacgtgataaaagattcctggggccacatagaactacaaatagtcgaagggccatcaagcctccatgcacagttggtgagtttggaaagctcaatttatgaaaacgcccaagcaagcccaatggtcacaatgccaactagaaaggtggtagatataaaccaggtggagtgcccgagatgcaagcaactggtgtgggactcttgttctaaacacgctccactatgggagacagactgccggaacaacctcactcacaagaatcctcaaaccctctgggagtcaatgaaggctgtgatgtcaagggaccagacaaacgtgacaagatcgtggggagagcactggaagggcatattcgagagattgaatctaaggaagttccatcacgtgctagatgagatgaccgagcccatcatgccatgtcaagtatggaggacagagaatgcatatgcgtgcacggaggcagtaagattgacgcacggtgcaatcgtgatggtaccaacatacggcgggccagtcgcagcagtcgtgatgcaagggatcgggtgctggcacttgatcagtagcaagaatccttggcagcccacaggcggattgcttctgatgaggagcaatgctttcccgaccgagcgtgagcaaaggccagtcacccattcaaaaaccttgtgcatatacaaccaactatccaaaacccacctggacgaggagagtgaaacatggcacccggtggccgtagaccacacggcaaagagggtcgtcctgtactctttggatgttagggatcatcactctgggtccgtaagagacgcaataaacaaggtgaaggacagactggtaaagccagacttcaccctctggtcagcagaagagatagagaagatatccaattacgataccttaggatacaccttgctcaaaggccagctaacacccagggtaaatctattcgtgacgtctgacatctcggcacatgcaaaggagactctagagtattggtgggacaggttcaacaaagaaggtcacccccggaaaatcgcaacggctcaaagggccggacacgtgataacggtgaaaatgggcaatgagcggggaatagtgccaggacacccgctacagaattggtacaaaaagttccagccactcaagagcgtgatggacaccttaaagatgtatcaatcagaagcgataaaagagttcaggggtcgcgaaggccaaacatatgacataatctccatgacagacaacgtggccatagtggccatgatggagtgcatcaattcggacacttctgagatactagggatctattctagcaggataggtctgcacgtgattatgatcaccaggtctgaggaggatcgtatcatgcttgtggagatattcaagaagatacgaatggtttcctacgccgaggaatgcctgaggaaattctgggagcagcaagataaaagattggaggaccaaccacgagatgaagatgatgcaagtgaggttaaccccgaggcaggagacagctcaaggtccaagaaatcagatgacatccagatcgtcgaactagaagacacggaagaagaggttaccaccagcagcggaattactccagatccaacagtgcaactatccgaaacagaggccggagatccactgccagccactacaaaacaaatcaaaatcacggaaatcactgatgatatagacattgaaaccgaaggcactccgtcacagtacgaaccagcgcaagtttccgcgatcagtaaggcaggagccgacaatagcacacccacaacaagcggcgcagacaccacaacagcaaccccagcgggtcaaacacccgagacagaagaggtgatcattgccctaggaacccagggccacgcgatgacccaagttgagctgggcgcaaccgctgagtcaaaggacactgtcgaggacacgcaaaccgcgagtgcttccacggaaatggaaactggaaaagacacctcagagtctgacgcggagttttttgatgcagtggaagacagtcccgtgccgcaaaccactccgcagcaagaccaagccaaagtcgtcgaagaaatggaggaactggaaaagaacaggcaacaaccaaagactaaaccgatggcgaccgtcgtcaccagagacacagtaccaataacaaacgtcacggctaaaacgttgaccacccagcctaggaccaggaaacccaagaggaccgcgacgacagaggccggtggcgcagataggttgttgttgtacaagaagtgccacaagacacacagatacgagaccgacggtcagacacatcagcccagaccagggaaaacagggccaatattgattaccggccctgagttgtcttggttagagatcgtggagctggggcacaaaaacaggaagaagaacttgcccatcgcaaccacatccaacctgatgtccatcctagaaccgacactgatccatgggccaatggagaagttcagaatagagggcgggaaaaaggtgttggaagtgatggacggcccggaagaggagctcttggcagcgaatcaaaacctattggacaggtacatcccaggaaacactgctagactaggcctcttgtacaggtggcttggttgcgatgacaagggcaaataccacaacaacatgacagctggagtatgcggaaccagagaggtgtgcaacccagaagaactgacggagtggttgttcaaggaagacacggcaaggggggagtacatatggaacatgttcgcattgggaccgcaagcacgagccaccattcaagcaaccagaccggtgttgcacgaactatccagaccatctaactttcctgacctggggaccgggagagtcattaaacatggtcaatttctagtggatggaacctacgtcctgaagatgcgggtggtaaacaccactggcggccaactgtttggacacgatattacagtacaggaaaaaccagatcagtacaggcactcatggagggaaccaggtgaacgcggaaaatacaagctaggagaaacaaaggaagtcgaaattgccggagacttgatgaaatcgggacgtactaccaaattatcaatacggaggttcgacaatgtaagagatgaaggagccgcgactgacccaccctgggaagagatggcgtctgtgattttaaagaaccaaaaagtggtgttgacttcggccagacagtacaaccgatacaaggcattgcaagagatggctgaagaaatggatcaccaggggccatggacggtcgaactggcacccagcaagctaatagacttacccaaattagatgaggtccatggcatggtcagttgcaccttagactgggtttactctgatgcacagactgaagagatcggagaagtggagtgccaaagctttctaccatacatagagccagtagaaacggacactggggcactagtgggggacaattcagcttacgaaaacgtatttagcacaatctttttcgaggataatgacctgctggacttcatcatgaaggtggcccccagtcaaggactaataaaggtgtcaaaaataccttcgaaaatagtgaagaccaccaaaaccaccatgacgaagcgtcctttggaggcaaggccggtgttcacaaagctttcaggagcggaattcaatgcagtctccaggaggctgtgtagtgtgatacagctcagaaaatttgaattgtacccagaatcagagttctcgagactgaaaagtgcatatttccgggatgactgtgacacactactgaggggcatgcaggcaaatccaataaattacaatagtgatgaaatcagaacatggttggcagcaagacctgacgggctgcaagttgctgccgagctggaagccataatggccgaagggtttgaggtgaaccccatcaacagggctaaggtgcacgtgaagctagagtcactactaaaagacgggtacgacagtgtaggcaacagggaggtggaggcgaggatcatcgtttggcaaaggaaaggattctgtgcaatattctcccccatattcctgcaagcaaagtccagattgaagtcactgttaaatgataaaaccttatacgctgacggtctgaccgcaggagaactatccgcaagagccaggctattgccaggtggactgtggatgatggaagatgacctgagtaagcaagacaggcagacggaccgcaacttgatagagtgtgagatggaatgctacaaacaactgggcgtggatgagcgagtactcaggttctgggaaaggacacatcaaaactggaaattcaagggatcaagcgtctcggggatactggatgcccagagattaactggacaagcaaccaccgccttaggaaacgccttagtaaacatgatggtgcacagtagattggtagaggagaacaagagacacgtgagattggtctgcatacttggagatgacaacttgatcctgtcagagcacaaaatcagctcttggagacaggtgaaagacagcaaagactactataacatggtcagtaaagcctctcacagtaaagaagtgggaacgttcttgcagcaagtttgttacacaaactctgtcgggactatggaattcgcaccagacatggttagattgagccggaggttcgaagtgactaatggggtgtccgaagccaacgatgccaacatgttagcaagaaccatgagttattgcagcttgatgggtaagacgaaagggacagaaagggtgatcaaaacattaggtctgccaatcagaccaacccacacatgtgacatagctgctgcacggcaggcagtggccacgaagaggaacatgacgatacatgaagtggagggagcagagcatcatctgtacgagatgatggagaaccagcgggtataccactgggaattcctccactacatggacgactga

SEQ ID NO: 1220 - DNA, 14448 bp, Geranium carolinianum endornavirus
  source 1..14448: mol_type = other DNA
atgaccacgaagtgcctatcacgcactccgataacaaaaaactatgtcaatttgctttctaagaaaaaaaagaaaaacagcaaaggagacttgacggtaaaattgccgattttcaagcccgacaatattaaggagatcttgaaatgcgtcagcaatacttacgtgacttcaagacacaaaactaaaataataccagtaacgccctccataggaatgggagaattcttctctataatgatggatggtttagcctgggactgtgctaacaactttggactgactacttttcttctaggggtcatacaagggggtaaagtcctaagcaatcaagttattggaaaccataacttcaagagttcatataggtcatttaacgaaaaggttacctcactcacagtggacaattataaaggtaaccattccgctgaaaggcttagccatcaactcactagaagcgtaaacttgaggttagattacacgggaatcaaagaattagcgatatatatcggttatgattatcttttatttcccgaagaagattataacgcttcactgggtgacaattttccattagaccaaaccgaaaatttcctcaagaaaagcttagagtggtaccgtccctcaaggtatgccgaattacttggagagggttattacactgagtttgtcactgttgggaaggggtcaaaggttcataatctaaacaataatgttttcatctgtgtcgcttgcgggtgtttaaattccaaatgcgatgatgaagtccacacttgcggtaaatgccttagcataaatgcaaccgtggaaatagatgttaacgaacttaaaaattataaatgcctagttttatgtccttcttgttatgaatttgacagaagcataaacggcccactcgctgccctgagcctaaagaactacctagatgggggccttttaaacttaccaaaattgaacagcgaactgatagcgcaggacgttctgcgctatgttaaaacaaggtctagactagatgtcaaaaatcaatatgtatgcgccaacctaagtagagacgaactaaatcacctgagagaggaattcaaaaaccttgagataatagttagaaatacctggctagacatgcaaggaatgttgatgacagaaagccactgccacttaaccacattgctaaactcggagaaaaaaataacggaggtacaaggattcaacagatcatataccaatgtgggatccagtgaaaccaagttcagtggtgccactcacttgactaactggcaggagagcacaggggagattgccaagaatccacaggtcatgaattataattccataccgaaaatggaaaaattgcttagcatggcgtgtgctaggaaagtctacttaatagtcccaaatgtgtttgaccagtacaatggattttcaaatggattcagtttcgaaataagcaacgagaggggactagttaaaattttgataaacggaactaccaccgttttagaatacactctagaacaactgaaactattactagaatatgactacatttcctgtgacgggaaactatttgaagtcaaattgattaagaaaacatctaattgttccttaatttccgtatcaaagctaaagaaaaattctttagatattaatgagttagggtataaatcaatacaccctaaccagttcaagatgtttacgctagagataccagactggcaacaaaacgtgatgggactacaattaggaccaatgataaaacgcaggataaaattcaacatgagattccttaaacatctcataaccaggtgcgaagcatggcccgtgagtttccatggcctcagggagtatgccatagtttctagcttctctaggtcagaaaccaatgacatcgtcaaaaacgtattcgaggttaatttcgaagatataccagaccatgttttctgcgcctacaatatttatttacgtcaacaattaagcactcaattcacacactggataacaacagaaagaagtctgggactagacaaactaatccaaggctttgctggtggcatagtaggactgataactaacttgatgaatgaccaccagaatgataagtctttcataagccagttgctaggaaaatgtagtgacctttcttggctggtcagtgcccaatgggacaaaattgaagactcaattaaatcatgggaaacaggtgccgtaaaactagcagagttcaacggaaggattgatgaatcacaaagagacgtgcttgaaatgtgccagcatggaatggagaaagacctaatatccaatggatgcaattgttgcgggaggaaaactaacgaacccagcgggttttgctccacgtgcaacctagaaggttgctgttctcatccgtgtcttcacaggtgtaatagtaaaatagaacatttctgcgagggctctgtcacaagacctgatgtaacaatcggtgacaaattaaaatgtggccatactatagtaaattgcaaatgttgtcgaaaaccttcttgtcaagaactgtgctacaagtgtttcgagtggggacaatatgacgacaacctaacgagaatggcggtggtagaccaaaccatatacaaaggcgaaggagcagagtcagcagtcaaaagagtgataaagcaggccaggggaaaacagagttatccaaaatcgatcgaaaaaaaacaagtgacttataggaaagaaaagtcacaacccaataaacaacccgaaaaaggaacaactacaagtgtaattgtagacaaaccgggggatagcggcgaaaaagtgcaaatgcaaataaccaagaaacaggaaaggaaatacttcggagttagttcagatagctcagaggaggaagcaaatcaagatccacttccaaccaaggaagtagataataaaccagtagaggagcacgaagacaaaagtagtgatgaagacgaaccagtagatgataccaatgtggaaaaactcaaacaacatataatgataaatgaactcagggcaataactaatgacgaatactgcagtataatatgccaaaaggccaagcctatggctgagttgataggagaatcagtcaaattcaaatttttatatcaaggtgaaattttcattgatcctactagcataaactcaattcgccctataatagtgccttatgcagtaggtttctgcctcagggacacactatcttattataatccgatcataaatgatatatcatggtccgacgcatgcactgacatgggactagacgaatcctggtgcatattaaatgacgtttggaaatatgctgaacattttgaaatgaacgtattggttatccacgaaatggaaggtgaggtggccggggtatatggctatgtgtatgacaaatacgaacaggtcaatatgataagatactcctccggaaaacccgggagagaagactatgaagaacttaggggccattacgaaccttgcgaagttggattcaataaagaaccctgcctccctcctgtgtatgctcctgacataacttgggaagatgtgaaccaagtttattccaatgtgactggaggaggcgatctcggtgaattttacgacaaaaacatcgaggacaggcttactatagcgctagctttaaacgaaaataaaggcataaagtatgccagttccgggtttccaaaactcgagctaagcaataggaggatgggatacctagtatataataataataacaaccaacacgaacccaggaaaggcaaattagccactttcattaaagaaaccaccataaattctcagcttaacatacctagccttctaaccagggctgaactacaagaatggtgtctagaaaacctagtcaaggaggaaaacataagtaatgacaccgaatgtatcaagaatgggctggtcatgataattagtcagtatttagaacttaaaatgagttgcgaagaaacgttcaacaaccaaaatccagacaattccaacatatccctcttaagaaaaggaattaaagtagtggataagggcaattactcgattatactggccttagatggactagaaagacttaagaccggagatgtcataatgatacgacgtggaccaaacagattctgctgccaagtagaaaggaatattaagaggataatcattcccaaaatgcctggacatgggaccaaactactagcggacattgccatatttaagattagctacacatccctaatgatacaattggcatcgatgagtcatcccgggataaatctagaaaaggcaaagaagttattgacagaggccacatgtatactaggataccctggaactgggaaaacgaaagaactagtcaaacaatatagtcaaaactctggactactaattggggtgacacgaggtagccaagaaagtttaatacaagaattaggttctagaaacaaaatagtattttcggcagaacgtgccatgacaaatagggcctctagtaagactgtatacatagatgaagcgtctttgataacattacctcaattgtgctgtatgctaactcctttggtagagaagttagtcttatcaggagatttggctcaaattccggccaaggaattctcaaaggtttgcgggtaccaaccaactaacatcctagaatttggcaagtatgctggcgcaacaactattgaattaaagaaaacctggagatttggcagaagaatatgttccatactaaatgaagcttttggtctagatatgcagtctgctactgaaaaagaaaccaatgtgaacctagaacattcttgcggaatagacaaaaatagcttaaacagaatagtcagagacagaaatatagacacaattatggtttttacaacccaggttgaaagacaagtgaattcattactggaacccgaaagtcgagttaaggtcgccagagtgcatagttcacaaggaagctctttcgagagagtcctaatagtccaggactaccgtaaaggcccagcccagggatcagaagaagttcagttccaaaaagaatacgtaatagttgccatgactaggtgcaggaaagatgttaccatattgtgcacgtacgaatcgtgtaaatgccgagaaacctccaatgaaagtatagcaaggcatttgaacagagacctcggattacaatacctgtacagaggagggaaaagccatgacatcgatgtcatgggaatattgaatgccatacaagacagagtgtcaggattatttgagagcgttgaacctaacctaattaaagattggctacaggaattatggaagatagcgaccggaggaataaagaagaaaatgtatatgagaatggcaacaatgataaaggactgtgatgaccgcgaagtcctgaagacattgctggactctggtatgccaatggtatcagacgtagtaacagaaaacggtaaattatatgccatgatgaattacgacaatactaattggaattacataaagaaaaagactatgacattatttaatagcaaacagctaatagagtgtgtcaataacaaaattctgataggaggagttgaaataatcggcgattgtggatctgaagaaataattgtggatgccaacaaattcgattcctgggaaagtacccaaaagcacacaaaaccgataattatacgtggctacaagcggaaaatcaattcggaaaattgcgggaacataaacatgaatatcagattaataaatcattctagtcaactttgctggaatgctgcaaagctaactcttaatatggaatacatgggagtcaagtattgcataaaacccacaaccggctgttccttgtgtggtggaatacaaatcactaagcaaaatggtgaactcatggtgttcataaataacatgtatgaaaattacagtagccgtgacatacagtttaagtcagaatcagatccaatcaccaattacctgttaggaaagtgggacatggatccacgggatggtcacctctgggagctaacagctaagttgcttcctaatgtcaaccataatgcactgcactacactttgtggatagaacgaatcctagccgccatcaaaggaattaaaaatggcaaaacctttaacacacaggagggacacttcttcagaaatgagctggaactcaacgagagaatattatgcagatacaaaaatatagccaatgaggctggaattaaaataacctgtgaaagcgaccggaattattcttacttcaaaaatctttctttcctatttccagctaaatttaaaggaaataattgctacgtgtatttccacaaacataaaaaatgcgtactagtgaacaagacgaagaaattcgaattgtcatccgaattggttccgaaattgtggaatgaagaactatacagacttccatatagcctctccctcattttcggaggtgcggaaataccaattaaagggcacaaggaggtaatcaatatgctggaccttgatctagagaagcatgaccacaataggagtaaattaatgctgatgatagacgaagacttaactaaactagccaaggacaagaacttcgcaaatccggaaatagccatacctagtaaccacatagcagacggaaaggacctaggattagcaagcaatttcaatatcatacctgatgttaaccttactggagttggagtgtcatacctttttgactcgatagctgcgaaattatttagcttaaacctaatggaatccggcaaaactttcattactagatattgtaacttgtcactacggcaagacatcgaaagacatataatgatcaaacctattgacactaagataacccattataaagacagtgaggcttaccaggattgtttcgctagaatactcagtaagagaaacacagtctccgaaatagctaaaacctcagataacccagaaaccaagacaaaacacacaagaatagaacaaatattgcaacaaatgctagacggacgagatttgtcaagtgtcgtgatggaaagcaatgattcctgcaaaacaaatataggctgtctcggggtgagttgtttagaatttggggatatcgaaattaggaaaatgatgaaagaattgaactgtaaaagactaattggcttcataccggatcttagaaacaaatcaattagggaattagttagtctaaatgaaggtcatttactattcaaaggagatgccagagattatgtaataaatccaaaatgggcacaactaataaatattttatatagcagcgagagatgggaatctagcatgctattagagaacttgaaaatagtgggtcaaactgatctattcttggttgttgatgtcactgacactaacgagatcaccgttggtaaaatcccggcctccatgcacaatgatgaaacagtggtaacagtaccccaacttaatcctataaacgagattaggagaacaggaaatctattcaatgcagtagaattcgttatagacaacgaaacattgagcaggctagttaggagagccatgacacctggatgcactttaccaatgctgcaaacaatcgctaggaacaggatgcaaagtacggtaataaccaaatcaggacgtagggcaggagggaggaacgtcataagagacgtctccttgtgcgcattagtcgctcaatacattgcaaaccataatgataaccaaataaccagatatttagaaaagatagacgattatctaatggacaacaaggactggaagagatcctcaggggcattgatacacatgctaaaactagaggcaaacacgataataggaaatgctctaaatatcaaagtatcactaagtgagttatcaaaagtgttaggagaagtagcatacaacgttatgacggataagtccaacaaaaaaggaatacctggcataagagtaatacatcaacctcacaggataatgtatggtgaatactattatcacggacttgatttcaaaaacccaaattcattaaacctggatccaaatgtaattggcaacatactaagaaactcctttaagtcctggaccaaaaatgtggaatccaaattcgcaggctactgggcagaaccatcgactaccaactccaaattgtcagatcatttagtcccaggaaaagaatacagcgtcaaagtgttaatttatgacatgtctggtggtataggcaggatattgcaaaataggcttaaactgtccatgaaaacagatagtgtgatacacagctcggtgtgcataggagataatgaaatatcttatggtaacggagttagaataagcccattgggatctcagatggtgggcaaaacttctaatccagtcacattaggcaaaattaaattaacagccaaaaatatgagggaaatagacgacataactgacaagatattcacaccgcataagtatagtccaattggattgaattgcaacctattctcgctttggctcatcatacaattcgggtacatgacaagaattaagataagcgacagtaagcttgaacatctagaaaacttggccagcctggttccggagtttggatctaaagtacctgaaaacgtaaggaagtacataatagctcttaattctaaagttatgggaaatgaagaattaaccacaaagatcatgaaatgttttgaatatactgtcaagagtgagaggccaacaggcaataataaactgaataacttcatagcacatcaactaacaatattaacaggaagaaacctaacggagctaagaatgcaaatactggaagatgatgaatccgaaagtgacagcctggaagactacagtagtcatgacgatgattccgacggagatgacgaccagaatgaaggaagcaactatgaaactgaaactgatgacacggatgatggaataacgggagatggctcaatttctaacgatccccttggtcaacttggtcaagaggaagacatttctagaaaagaagaggatcaagaaagtgactttgaatctgcaaattcaacagacgtggaagaaaacgaagatccaaaagaatctgtcataactgttacagaggaactccgtgtttccaacgaacactcttctgagcaattggcagaggaggttccggaaaacaacgatccgggaagccaaagcgaagttcccacgaacccagaaattaagaccgatctagaagtagccccaacagaaacaaataaaatcctcgaggagccagcaatttctttagacacaagaacagtaatagaattcatcaaggaagaaatggaaaaactcgaaataaataagattccaactgccatggccaccgcatctgatgcaatcggcaagttattctcaatggctgaaatagacccaaaggttgaattgtgcagaaatgtaaacgatgaaatactaaatggtgccttgaacatatgtcgacaagctagaaaggatttcactgttacaaacgaagaccagagaggactaatgagcaaaaaagaaaaaatagggacttataatgaaagactccgattcaagataataaataagttcaaaaaaatatcaatttgtgtcgtggcgttagggagcaccggggacactcttccaattttgagcgcctgcaaaatgctcaagttaggaggagcttggatctgcctattatctcatcctgatatttatggactggacgcaagtaatcatgacaagttcattaaaataaacaaatcacagagaagaactacaggaaatattaaaagcgatagtgcaattgacattgccaaacatgcccagagtcacaatattgaagcactacggactttcaaggaagcgactcaaaatcatgacttcgatctagtgctcagcactcctttagcaccagcagtgaccgggtattcgatttttctcggcctaagaacagctgaagcattctgcacctattgctggaacacgggagtagagcaaggtaataatgaaagcgacagcttcttattaagatggtttggttttactctaaagtatgcagcagtagatggaactctacagatattgaggcagagtttagctacttctatgctaagagaaatgagtatagaaagcccagacatatcaactgttcccagaatagtgctaagctgggacgacgtgcattctgagaaaaatataaaggatcccaaatctgtattcataggttatacaagccctgggatgaaggcaaacgtacttcataatgactatagatttagattattggttggatttggtagcatgcaggtaagagaggagcaaatagatgaaatctcaaaaattgccagagcaatgtccaaggtggagatgaccgtaactatccacgttcaggatgaaattctgaacaagctattaataatatcaatgaaaaacttatttccaaagtgcaaaatactactaggtaacgttaatcttggtgaagtgttagccaacaatgacgctatgatatgtcatggtggaataggaacagtacaagaatgcttgatggcctgttgcgttcctataatagtcccttgttttgctgaccaaccttacgtcggttcgaatctggaaagaaatcaattaggaataatggttggagagagcgaaaccgagttaactgctaaacttaaaaaaataccaatgatacagcaacgaatcaaaaggaaaaattattcgatgactgacagcgccaggaatttggcagactcagtactagatctgctcgaatctcaacccccggctcgtgaacgcaaaactgctaaacctacaacaactgaacaatctaaagttccgtccgggatagttataccctatttgacaacccctagcgagtctactgcattatcattggcccctggagagtaccaggttaacggcgtaataagtgaggaaacagtttacaaaataggggaatcttattatggtggggagtgcttcaaagatgcttttaacaccggtgttcttaggcttagagggaatgagtatcatgttagggcaacccatagcactgcctccatcacaatagagacgacttccgacatcccaaaattgaatattctaggattctataaccacgttaatatccaggtactggggtacagcaataaaactgtcatatttaacgaaaactggccattgttgtccatatacgttacaaggacctcggaaaggagaaaagagaacaacttgcacgctttcattgtcgcgaatagaaccgacttggttaggatagaacatgtggcgaaaaccggagataaaataatgtcgataatagatgtcaaatcattgagtagtcgtttatcccttcccatcggaactgacccaaagaaagctataagctcaatcattaactgtaacgacgaactgagtgaatgggattggaagtgctacggtagctttgaaaatttaaaaaatagattgaaaggagagaatattgatgccctacttcaatcagactcctcactagccctcccagttttaagaactactcaatatcctgacggagcttgtttcgaaattaacatcaacactaggtcactgataggagaagtagtgtactgcttcaccacaatgggaatcataccaggcatgatagttaggcaaagtaccaacaagatttacgtaatcacactacaacccataatccatttaagcgggctaataagatgtagactactcaggaagaaaacaggaatgatcccaggggctgaaattgataaattaatgcaagttagttctagctatgtcctgaatgcagaaacgataaacaagatcaaggagatcatacctggatccaatccaaaattaatcactgctactattcaagaaatggtgactgattatgtggtggttgccactgcatttgacacccgttcccatcactcggatagaagtgaatatgaacggaaaatactgattgaactaattggaactagcaaactcaaattgttaccaaatgaaataagcgaaaacctagttgcaatattaaaactaacgcgagtggggtactacaattacgcggccggctgcttatggtataacatagagtgcaaagagaaagagttatgcctttcgctagcaagcattgcgcaggaatgcattaataaaaggggaagtttcttcaatagcatgctaaattttagaataggagtagaagacacaaatgaatttagggatttcattaaaataatgaataacaatttcgactacgaaaataatgacgtaatagctaaaaccaacggaaatatacaggaggacaagataataaagattaacctagagtggtttaatgacaatttagttgtggctgagaacaaaatagctggactcgtattcagtgaattccttgggaaagaaaaagagattgacgtaatatgccagaaaaacattgacaatgtgaacgtgaattctttccagttgacgagcggggtctgcatatctaaatcaggactaacaatactaagtctaaatccattgattaaaatcacaaaagttaagatgaaaggaggagcagaacccggaaaagataaaactgattctgaaatgggaagagtatttaatattcaaccaaatgaggtactgatggatcaacccttggacatggtcaaaggaccgaaattaggtaaggagaatttcggtagatatgataaatggcttaagcaaaacccgcacctggaggaacctaaggtagcattaaaaggcaaatcaatcatgtccaccagaaaatttccatgggaggaaatctatcacaccattcagtcagacggacaattagactttgatgtcaagaatgtttctagggactatgttcagattgacccaaatgaaaacgaatcccagttcggaaatttggagagcaaagtatccgatcctgctaagggccttttagaaaattataaagtgatagatctctgggaaggtggcagagaccttatcgaccatgtggtcatgcacgggccaactaacgctcaacggtacaccgtgaaagaaggctattattcagttatggaagtaaccaagaccatattttctaagtatccgattcaatgtaggccaatcttccaagacgaagcttatgccagtctgaactccttgacaggtagactaggaaggagcctggaaataaggaatatgaagacagtccccgcgaccgatgaagtgattagtaaaatggccaatttattctttcacaagaattgggaagaaatgactaatatgtacaaaaccgacccaatagtattcaatgaaaaagacttcagggactgggtaatggggcataaaaatgccaataaagtaattaaagagctagaagatctttgtgctgaaggaataagtactaatcccttcaacagattcaggagccacgttaaattagaaagcataaacaaacctaatgctatagaggatttccggcaatctgcaccaagagctatcgtttggcttccgtactgcatgccggccctttttagttacattttcaagctagcaagcaaccggttcaaactgatactaagggacaacgtccactatgcatcgggaatagatgttaatgacttacaaaattatgtcaactctgtggaggaagattgctacatatttgataatgacattagtaagatggactcacagatagacaagcacatgatagagattgagtgggaagttcttaaattgatgggagtggatccagaagttctagaaagttacaaagaacttaagaagaattggaccatttcaaataaattcgtaagagttagtgatagctggttaagacacagtggggaaccaaccaccgcactgggaaacggaataattaacttagcaataactagcctttcgttatcaagaactaagagatctgacatgaaattatgtctcttcgtgggagatgacatgctgctggtaactaagcaaaaggaagatattgacctagttaagctgagagggaaaaaattggcaaattcacttcttaaaccaagcattaacagaaggtgtggtccattttgcagtttcattataggatacagtgatatttgcagtggaatggccgttgtaccgaacgtgagtagactagccttcaagtgggaagtacccaatggccaacatgaaacgactgatgaatcggttttcacgaggcaactgagttatgcctgcttattaggtagtaatagctttagttcgatagttcaaccattaataaataaacagacgaagtgtgaactggagataccaacgtattatcgagaatcagacctaataaggttgaactgtgactacagcaaacttaaagaaatggaattcacggatctattgaattcgttatacaatagaatacttaaaccggaaactatacaagtaaaattcctaatcacatcggagaatataagaaaaggaatcaagaagatgagccaagtgaaaagcagtgatcatgaaccggagagtaaatgccacgtgagattgacggttgacgctgattaa

SEQ ID NO: 1221 - DNA, 1462 bp, Grapevine-associated endornavirus 1
  source 1..1462: mol_type = other DNA
atgactagggggctgactggcaacatgggcatccaaggctcgcttgattatgctttggcaattgcgcatgccagatattcgattgatgataccacctacaacatctacaatctagatgcacaaggggccatagaacacgcttccatcgcttatgctcttaatagaagggcggcggccaagcgtgggttgaacgtcatgatgcaggaacttagcccatcacttcggtacttaggtcaggcaattgcatcaaccatacaatcaggcctagaggtgatcaaggctatgactccaaacataacaggcacagtaagccagattctcgatgggttggatatgaatagcatgaacgtgttgacgaggtatgcttcaaacccagtttgggatgaattagatgattgggtcacgaaagcaacacttgctgatgtatcctcatttggaattgaagcaacagtgacagcacatgcgtactgcaatcatcagcatgataagtgccagcactcgggcaacggtcaatgcaagtgttgttcaagtcccactgataatgatatgtgtgattgctgcgatagcacttgtgcacacgactgtgtccatcaatgtataggacatgatgccggcattggtgagtggaagacttgtctgtgctgtggtaaacaaatgcgcacaaatcaggaggtctgtataagttgtgaagacacacctgaagattgggatagtggtgttgattatgacaggttttggacattcattagtcgcaagactgacaaagagcacactgtagacttcttgaaaaccaaatcaaagtacaacaatgaatttatgttccgcatggcaaatggcaccaccaaaccagctagacctgcaatcgaaccatgcacaattgtggatgctaaacaagggcttcacatacacctatgctattgtggcacaaggtaccagcactctcacccattcaaatccctattgcacccgctcttcaatggcgattgtccgaagtgcgacaacaacactactaaccccattgtgcatgaaccgacggatgtgcagcgggcgccagagagtcaatcgtttaaaccagaaactaccacaacggaagaagctgctcagactaaggcggtggctaaagtcgagaaattggacacaacctcatttactgacacaacgaacactagcaagctattggtcgccactgacacagtgtttgttgatgcattaattggattctctggccctgactctacatggccgacggcagatcacctgagacctggtgaccacccaacaatgtctagagtcgtttgggtcgcactcggcgattatttcacgtcacaaaccgttttgtccatgttggcagaattaccaagcaccgaacttggacccatatgcggctacacatcatggcatgctgtggatccaaatgggccaacgtatgatgtgatatgtaatatcaccggcaaaactgagt

SEQ ID NO: 1222 - DNA, 13995 bp, Hydrocotyle umbellata endornavirus
  source 1..13995: mol_type = other DNA
atgaaattgaaacacccattcattgacagggacaagaaaatcatttacacaatgccggccagatttagtgaaaagttggacatgtacggatttgagtttttatgcaccagtcaactagatccaaaagtcatttcgaaactgatatacatcataaccaacctagggtttggattcactgatccagataaaattgacaatctaagaactatagacattgatcattcttatgttggtaaggataaaccaaagtcagggtacaaaatgatggatagcaattggcaaccgatcaaaattccagactgtcaaagcttggattttgacatggccacatgtggtggtgagaccaaagtgttaagtatgatcaaagacagtgttaataagtttggcggttggctaaattattgtcttaaaaacaccaaagctaggcctgacgcctttggtcgcataacacatacaaacggcaaaatcgaaattgaaccatgcggcttagtaccagttaaattgtgcaagttttgtgggactattaacatttacagccaatactcagcaggtaatggggtgcatgatagcgtcaaacactaccacgagaaatggttaaagcaagcaaaaatggacaaatcagaaatagaaccagatgatgttatgaaagttgacaaaaatgattttcctacaaaatataacaaggatggcacatgtgaggtgatgtggaggtgttgtatgtgtcaaggtgacctaaacattgatgttagaaccactttggctcaaatgttcacaattattaaagcagtgtgggaatcattgtttgtactatgtggaagattagacgaattaatgaagcaaggttacggggacatatatgacgaattaaatgagcaacaaaaattaacaattcgctctcatgacaaagcaattgtgaaagagtactttttccatatgcggcagaaaattataatgtgcgggaatgacttagataggttatctcgagcacaattaggccggaaaatagcaaatttgtacatgactcatgatagcaaattaaattcaatcaagcctgagctgatagtggaagtgtgtattgcaaacaaagctatagtgcaaagtacacgtgaactaaatcatgaaattagatataacataattccaaataacctggagaagacattgcataacacgatgtttgacgattggtgtttcaaaaataaagcagttgacttttgcaatagagaagcagagtgcaattgtccaggagagaaagtcacatactttggatttgcaggatgcaaagcaaccgtgctggagctgttgtatgcatgttgtttacaaggccatacatatattctagtaccaaagttaaatgatcatggacaatttgaggatgaaacgggttacacaaccacaagtgatgggcacatatatctgtttgttgacggtgcaaatcaaccattgatcatgaatgaagacaccttcagcgtgttatcaaattacgactgcatcatattcagagacaagttatttttaatcacgactgagttgacaatgcagtatgtgaaaattaggatgataactggaccatataacagttatgatcagataccgacacacaaaaatctattgggagatcacccgaacattaaaatgaatttgccaaaaattgaaggtattatgggtaactggtcaggattgaactttaaagaagtgcagttcaagttagatatgccactgttcagagccttatgcctcagaaatctaagtgggaaagtgagttatgaaaatgcaagggagtttgcagttggttattcaattagaaattttatggtgaattctaagcaaattgtcaatgctcatgttcaatatacagacatagacgtgcatgtgctattaagtcaaatatgtatgatgacattgagaggggactacacaagttcaatcaagtatgttgagtggagcagatgtttgggaccattaagatccgccataccgacaattgataattacataacaaaaacaagtctattcgtgataaccgaattgttacactatgtgactggactagaagccaatagtatcataactttgatgtcaaaatcaaacataaacaactgggtaaaaggattctgttgtaatgatttttggcaaaatttgttaatgatggccgatgaattacaagtagaagaattgagtttttacaaacttgaatcgaaccaaaaattcccaacatttaagaccggtgagccattagttgtatgtcagcaccacaaggaagaatgtgaacacgagcatggagacatgctctgtgaatgttgctcattgcctagtagctctgtatactgtgagtgttgtgcaacaggaagaccaacagggttctgggaatttgttgacacaactgtttcacaacaagaagatgatgatgaatcaggattcgggttaacagtagaaaaagtaaaaagaaggattaaagagaatgaaatatataaacaattgataaaagacagccaagggaaactggaaccaacgcaattatcctgggagagcagacgtgaactagctaaaagaagattgccagacgttagatttagtagacttgagttcccaaaactggaggaaatcaaaagagacgcttggggccacccaatggaagaagcaacaaaggaacaggagatcgatgaaaggcctataagccccaaagtgccatttgcaaaaattgtgaaagagggccaagacttagcaagaaagatcaaagaaatagaggcaaatataattaaaccagtcgtcccagagttaccaggcttagaagaagacacaaaaatcaccgaggaagttgaaagacaaaaagaaacaacaattgatcaaatcacccaagagacacctggttcggatacaggtttgacaccaatcaaagttgaaaggcacaagtacaaagatgtaacttacaaaaaactgaagccaataaagtttgaatatgaaaaggagtttttgttacggaaaggtaatgtattgaatatagagacaatgataaacgaaatgttaccaatattaggaaataggtttgtcaaacacgtgactgacccaatctattacgaaggattagccaatcaggacacagaattcaactacattttagagcatttaccaatggggttaatcatggtaaacacagatacttttaagattgttaaaacacaagatataccaaataccgacctgttgacatgtggatttgatgcttacataaatgccacaggttctggaatttcactagagacatttagagccattacaggaaagccgaacacattcagtgacatggatttaatagacgtagccacagcagaggaaacaaacctaattgtcgttacggaaaatattgtgtacataatgcatggaagtgaaagaactgatgaataccattgcatattgctaatacctccaactgaaggagcgacgattgggcactttgtaaggtgcaaaatagagagagttaaagacacaccgatttatttgatggcgtcagaaacaagtgacagagaaatcaggcatgcaatgcttaaagacctagggctgagtcaaacggagttgtaccgggtagacgaattgacaaaagaaaacaacttagaaatcgaatgtaaagttgcaaatatgaaaaaacatttaagtaacatgtattcaagcaagttaggcgccacaatttacaacatcaaaggtgtgcactatttcacaaataacgccaccagaaatcatgacctgtcgttaggggaatttaatgtgcaactagaagactcaatgataggtccagcacaaaaattgattacagtgctgacctccgattgcacggatgatagcataccaggccattttgacaaaccattgggtttaccaaatgacttggtgagctttaggaaagactacatagatgataatttgagacaactttgccgagcaagagatatagaccatatgactgatgaaaagaatgtgaaagcgtattatagtggctatatcaaaccctggaacggaatgagtaaattaatgttaaataatgtgtcaaacatgaaattgaaattgttagataaagtagtagttgagataggaaaagtgaagaaagtattttctatagtggacagggatgggaaggactggatgattaatttaccatcattaactgagttgaaggtcaacgtaatagagagcaaattaagttttggctcgacattaaggaacatactgtcaatgttgaaaccgttagtcgacccaaaccaattcaggaaaattttaacaaacacaagattgacaatagggccagctggttgcgggaaaacaacagagatatcaaaaatagcaaagcccaatgatgtaatattagcaatgaccagcgaagcagtaaacaacttaaaacacaaggtgcaacagtgtaaacaaatatatagtattgaaaaatttaagaccttatcaattgaaagagagtacgatctgattatagatgaagccacaatgctagattggtttgctttgtggccgttagttaaagataacacaaaagtcagcctatatggaagcgacaaacaaattggttatattgacacaagtgaaacaccaggcgtgcgctccgtggacccaatttcaaaattgataacaccagaaaatataatacggctgaatacatcttacagaattggtgaaccactgataacagacttaagggtatttgatgagaaaatcaaaacattagctgaccacagaacagaagcaaaaatagaatgttactcatgggatgacaaggaccagattaaagccagcataattgcattcaaaccacaagtaatactttgtatgtacaataaagtcaaatcagaaatctctgcattgataccagaagcaaaacaaatgatacaaacaacccactcattccagggtaacgaagtggattatgcagttgtagtattgaagtcaggtaaaggaaacgaatggggattgaatggagatgccctttatttgtattccgcaataacaagagcaaaacacatgacaaaaataatagttgttgatcatcaattattacccccttttacattagcacagttgatcaccaaaaagggaggagaagatgatccagaaattgaaattgacttaataacgatcaacaatatgcatacattaagtgaacaagaagtggactcattgaatgaaatgaatattgatgtaaaaggtgccaaattaaaatatgagacaatagaaggaggtgtgatctgtaaggctacaatgttcggcttggaagtagccacaataaagaaccaaaatgggacagtaacggttacaggggcctcccacgtaataaaccaaataaacagagcaaagaatacaccaataccaatcttaagatcacagttagccaaaaacatgatcaaaaagaaattgaaattgacaatgagagcatctgcaaggttaaaggaactgggttggttaatagataagcatccaaagggtgcaatagagtggaaactatgcgaaaaaaccatcaaatttataaaagggtccggatgcccaacaatgagttcatacacgataatagaaggtgagaaccaaataataatctcaaatgcatgggataaattattacgaagagaaatcatatacaaatgtgacacaaaattgagcgagctggcaataattttagattggttagatgtaaaacaaaatgtgttttatacacaaatcagttattgtgacacatggctaaatgtgatggaaggtgacatcaaaacaacaatagcacaatttggggagagattgagtaatatgcatatatggatattaaatgcaatgttcaatgacaaaggagttagatgtcatgtaaacaacatgaaaaatgtgtacaagtttaataactttgttggtcataataaagcgagaacaatagattatcatcaaagtgtgatgcctcacaaatcattcattttggaggcgaacaactggattgggagaaggctttacagattagtgacctccagtggagagatagtgtcagtgaaagtaaatgacaacacaaaagattataaagagtttatagtggaagcattaagtgatttatggtttaaagaaccagaaaaactgttaaaaggaattgacacaaatttgttagacataccaggcttattgttaagtgtgcaaaaacacatgcaagaaaacacaaaaattgctgaattcatcaaaaacaacataacccaaatgattttagaaaccaaaaatcctatgagagatttcatactagtgaacaccaagaagagagcctcagtaacaaatatgctatcagtaacacacccacatcaacaattgatgccaactgaaatgtcaacatatttgtcaacatgtgaaattgtggtagagcaaatttgtatgaattatctattcaggcagcaatatagtaactcccaaattgagttagtttacggaggatgctttataataggattgtgtttcaacaacctatataatgttaaattgatggattatgatccaaacaaccacacactaatgcatttcaaaatgcaatggcacatatacaacgatatgagaatctcaagattcaaatcagcagaaattaaaccaaaatccactgatttgattagtaacttgcatggagaatgcatattgttgctaggaattgaaataatatcttacagctcagaaaaaataatagacttaatgaaacaaaataaatctataacaatatttggagcagtgccaatcgaaactggtccaaaccagtggtatcacatgtacggcaagcaaatgatagcttataaggatggaatgtatttgagaaaaattggaaacaatctgataaatttggcaaacacaggaagaccaatgtttgtgtgtgatggtgaatacataagtgttgaggtgtgcttcgagattgcaagtcacaaagtaatatgtttaacctggaggaagattcctaatacgtgctacataaagagaagcagtgaatcaacaagggtaaggccaagccagatggaactaacagtaccatggataaatttcaattttaacaatctaatggagacaagcagcctagtaacaacaaagaaaataatagtgaacgtcaaattgttacgaaatctgttaatacgactgatgacaggaaatgactcatgggacagcctgctagcctatgctaggacagtagagtcaacatacatagtaacggagagccgtttggatgacatgcaggcacattcaataccagagttgttgaacacagcgtggtatgcattatttatacataaaaattatttaggtaaatttaagttattaagccaaattgtggacaaagcgatgaacagtgaattgaccctacagctattaaaccagctagtgccagggttaatggagctaacaaacgtggtcagtgaaatagcagaggagaaaattttaaatttgatcaaatatttgtcaaaaagattaaagttaagcagtgaggcaatacaagcaataggtaatttggaaagatctgagtggttaaagcaagtgagcaaacatagagtgattaaatacaagttcaaaggccatgtaagttcaactgaaacaacagatgacaataaaccagatgaagacgatgatgatgataacgatacatacactgatggaaagccaaagaaagaactaaatgagctatctcggacagtgaaaaaactggggaagaggataacagactgggtagcagttagtgaatctgatagtagtggtgatcatgatgaaccaatcatcgatgaaattgacaacaagttgcattcacaagacgaaaacgttgaaattgaagaatattatgaggatgcaagtcaagagttcacggatgatgaggaagacagtgtgtctgagacagaagacagttcaatagaagattttagagtggacatcgtagatgaaataattgaacaacataagaaaatgcaagagaaaatgagtttattaaatgaaggtaacaccccaatacatcatctaacagagatcgagaacaatcacacagctatgatgcaagaattaataataattaatgagagaaaagaaaaattcgatgacgttttacttgcatgcgttgccgacaacatgaatgtcaaagatagttcagttactagtgcattcaaagggttttggaatagtttaaaattgatgtcagatgctcaaataaaatatgtggcagagattaatttgtcaaaattatgtgcaatgaacacagaaaaaattccaataacgtttattacctcagagaaaaataaaaacaaattgccaaaattgatatgggcatattggcactcaagggaaataccaatattagtatggaaaatgataatgtcttggcaaaggcaaatggatgattattcagtgatattagtgacaagggaaacaagtaacagatatttagaaaatgaaataataaactgtgatgatagcaatgtagcccaatattctgacataattcgttgtgcactactagcaaaatatggaggtgtgtacattgatgcatctagctacatgacaaagagaatcgataaattagttgattggactgtaaactcagatcatggaatcttccaattttcaatatttgataataaaaatcttaacaagtcatatgagaattggttcataatttgttgtcaagggaacaaatatatggtgtctcttgcatccgaattgcaaagaatgaacaaagcgaatgtaaatgataaactggacttacaagtgtggctaaaaacaagatttgacgaaattattgcagaggtggcaatacgtggagtgagccatgaaatgatgtattacttgcgaacctacacagtacagcaagcattaatttataaatacaatctggatatgagtcagtgtatctatgcaaacgaatgtccaataatttattggtctagtcatcatgaaaaaacctgggtggagaaaattaaaaacctttgggattgcaacatcgattttataacagggacacaaccagttttaaagttagtcagtaacttaagaatgagcctgatcacatatgacaatatgaatggagtggcctttgacaacagtttgcttgaaatcctaaggaaaacaaaattagagataattaatgtgtgcaacagaataccactaataaccactgagacaaggggcgagctcgaggtgactgtgccaaaacttatgataaaacaatcagatgcgtatatcatatgtacaggtaccacaggagatttagacccatgcattcaaattgggaaactattatctaacagtggaaaatctgtagccataatatcacattatgatcatgaaaataaagcgaagaaacgattaacgaatgtgtcattctatccattacaaatatctagtagtgaattaatgagagctggaataagtttttataacaacacatccacaggggtgatattaaatgcaaatagcctacacactaaattagccaatgaaattgaaacattgctagataagttgaacataaaaggtaagataataatagcaaccggaatggtacctaacctagataacctaatagagaggtacaatgctctatggacaatcacaaacccatttccattggaatgggtgacaggttcgagctcctcaaaaatctcaacaaatatcaaaaatctattagcaaaagcggcaattcaattcaaagcaaaactaacaaaaaagatgagaaatgaaaagataatagctgaaaagaatatgttgtacacttataatgtacatttaatggatactatcccagacaccgaaaatgaaaatacttttatagttggaccgttaacatcaagtgaaggatatagtcaaacaaagattgacaagactaagcgatacgtggcagtaatgtttgggagttgtattaactttgtaaatcattatcacgtgcaagtaataatagaatactttgtttcaaatggttatgacgtaatactcaatatagatccaagccaaatcaaaccccatagccatttagaaaacctagtaactagtcaaacccaaaaggtaatgtgtttaaaagaagtcaatctgcgagccatacaagcaaacgtggatgctgtgatttgtcatggcggagcagggacagtgaatgagagcatacgttacaaaataccagtgctggtataccctatatttgctgaccaaccgtactgggcaaaaatgataaaaacaatgggttacggagaggaaataaattataactcaatgagtgaactattgaaaacattagattatgccatggtgaacctaccaacgtttaaacggaacataacacacaatgcatcagtaataaataatggtaaaagattcaacgagtggttacggcaatatctaccacagatatgcaatgtaaggatgttgaatgccactatggctttgagtcatggtgagatcaaggcatctgatttaataaatccacaaatagaatggacaccaacacaattaggaatttttgacacgaaaacatttgaggtacaaaaagagatcaaaatcaaaacgtccaaacaatgtgtctggcagagtatacagaaattattatctgttgatgggttgaaatcaatcagaaccataacaaacccttctttcataaaactgcgcagtgatgccgtaaaaccagaagactgtgtgaatggaattttgtcaattggattaaacctaataatagttacagatgtcaaggcattatgctacaatgtttattctggggcaccaacaatcgtattgagattcgcaacaaatcttggttttatgcattgcacgccaattgtatcaattaattgcagtaattggcgaccagtgatgataacttctggaaaaatgagtcagttcaatgaagagttgattaaaataacggaggaaataactcagacttccgaggctcaaatgtggttaattaaagaaccagagttaatgataagatggtgtggcaaggaaactgtagcagactgtaaagcaagattattattggattcaatagttacgatcaaaacacggagatttgaatcatgtatcacattagaattagatgaattcaaggatggttactgctcagtggtacatgttaagcaaactggattaaggcttggtctgatacttggttatactggatggagaccggtggtgtacgcagttaaaaatgaaatattggtgctactaacagacgacccaataaacaagaaaaatgtgttaatagatttgggaaaaccattggagaatctaattgctagacctgtgtcaataacctctgaaatattcaaagcttgtttaaacaagcccaccaaagcacaattagatgcagagaatgatgtcaacaaaacagatgtaatgtactcagaggggttaaaaaattacataatattagtaacaaattatgataacaggaaacatcataaaatggacgaattggcaataatgcaaggtgcgatacgagtattaggtgcaaataacacaattttagacgttgacaagtttgctgaaacccatgacctacccataaacaggctgtgcttaatcaatggagattattattatacaactgagttctctagcgtacaggatgcaaatttaggatatgagttaataaaggcgtacacaagaataaccaaaacagactatttactaggagatgagttggtcagccgaggtagtaatatttacaccagactacaattaacaaacgagatggttacaatgatgaaaaattattaccacgaagatggccataaagtcgtcttgacacaccgcctagatgagaggttacaaatgaaatttgaagagtttaaagagttgttcctacagcactgtagggattgggaaggaatagcagctgctttcaatatagtagagaacataaattggaataatgaagacgaagttaaaattgtagacagaagtttaaatttaagtcggctgacctcaacatcaaaattaaatctcgggatagtaattgagaaagatagaatacatttgttgatatgtgatataaccattattaaatctggtataggaggtgctcaagaaatggaggacgaagatattgacaagttaatggtagaaacccaaacaaagagtagaacacaaagtgaatcatcacacaatgaacatctgagagttgacaaactcacaactcatgaaagagagagttggaaagacaactcaacagagttcatgcacagtgccagcaacaaatggggaattgatgaaaattcactaagagatgccattaaagccaaattatcatcaaccacattgaaattaaagcatgtgatgaaacctgacaggctaactacagtcccagaatttaaagaggtctcattcataaatataatgacttactccgaaactgattatacgccttcaattgatgtcaccggtgatgaagtagaggtacatgaagactttttagatatttatatagcaccatacagctgtagatattgtgctgatgatatagacgtaatatacgattggccgtcattagaagcaatcaaattatgggagaatgttgatttaacaaattggctaacaatgtatgcaccactaaatgaaatgagaatagttagtaacgaattaccgctaagggttattgagacagagaaagtgacattaactaagtatccacataaaagcagagcagtattaaccaaagtgtgttatgaagaaattaggtccattgcaggaagattaggttcagttgtaaaagtgagaaaacaaagcccggagcccatcagctttgcaaacaggctagcagaaacttattttaaacctgattggaagaaaacgtgcgagaaatatgcacgtaacccaatagtgatagacccagaagatgttcgatcatggatcgctgaaaacaagtcttgcccattaattataaaagaactggtgaatgtattgggttgtgaaatgcttgtcaagccattgagtgacgtgaacatacatttgaaactggaatccttgctaaaggatgaacccattaaaagttggagagagcaacaagcaagaataattgtttggcaaaggaaggctgtttgtgcaatctactcaaaagtgtttgtcgaagcaaaaaatcgtttaaaggaagtgctaaagaacaatgtactttataccgatggtcttagaccagatgaaatttccgccagattaagattaacaaaaaacgcagtagggttctttgagaatgaccttaagaagcaagatagacaaactgatgaaccaatcattgaggttgagatgcgcatttatgcccttttaggggtacacccgaatgtaataagttcatggagaatgatgcatgatgagtggagattcaaatccaaacattgtagaggaacacgtaaggcaatgagattaacaggccaagccaccacagctataggaaactgtattacaaacatgcaagtacactgtgagtttgtcagagccaacagccatgcgttagagttagcattattcttaggagatgacatgtgcatggtatttaacgaaaaaccaaatatcaagaagctcaaagagtatatcgcatctcacttcaacatgcaatctaaagagaactggcataatgattacggcacattctgcagcatgttggttacaaaattaaacgaagggaattgccaattggctccagacattgtgcggatgaagtacaggtacgaagttactaacggtgtacatgagacagatgaagttagtacgttaatgagagcggcgtcgtacttaatgacacttggattaacaccagaggtgaaaaatgccataattgaattaaaactgccaataagaccaattgaatggtatgatttcaatttgatgatgaaaggctgtatgagcaaatataacatgaactacttagaagttaaggggtattatgatgatttactaaacatgataacaaaaccaacaatttatcgacacaagtttatacattacacatccgaggagaacatcaaaccccaccataattag

SEQ ID NO: 1223 - DNA, 16569 bp, Hygrophorus penarioides endornavirus 1
  source 1..16569: mol_type = other DNA
atgagtgccttgcttaacaacgctagatctgctggacgcggatgctggcgtatttacaaccttggcagcgtcgtcctgcaacgggtgacggcgcaatacgtcagggtgtcaactctgcaaatgttcattaaccgcgaggcgttgtcaagcttgatggtggactacaagcaaactcaaccagcagtttggcacgtgcaacccggcaccaccattggcgctttagcactactagatcaactgcagccgtgggaatacttgggttcagactctagttccgatatagattcttcaacaatgagtgagcgcaccgagggcacgtattatcaactcatggatgatattgagatggacatcctacaacaggcttcaagtgccggggtcgctgtcaatgctaccaccgtcacaccatccctgtggcaatggtttacaacaaccatcgagctgcccacatgcattgcggacattgccgtgatagtacaacgcagtgggcacttctgctacgcgcaggccgtggctaccacaccactggaatttatcacagcagtagctgaacacggggtagccgcacctattgactggatcattgcagtaatgctggaacgcgggctcaacgaacgcacaggaataacgactccacccacgatcataaatggggaatgggtgccgggccacattcaatggaccgatgaggtggacacaccactactaccacaattaatggcaatgcgcgccggtgacagtcccgctgctggactggttggcgctgtagaactgcatcgaccttacacattccggaagaagccggggaagaatgccactgtacaggtggaaggcaagataccagccagtccacaccaaccttcaatgagccacggtgatgacccactgacctttgcctatctaggcggttataaggaaataggcgacatacgcggccacccagggtttgcttctgagcaccccctggggggcagcgtgggtgacagactcaaagcgtgggtgtgcgccgcacaagataatgaattcgctcgcttaacttggctggagctgcaggagctcgtccaccacttatttgtgggaacctgcagcctaacgctccaaggggagttgccattaccatgggtggtcaaccccggtgtgttgacagacgctggccgcggaccaatcgcttgcagagaacttttatcacaaattatcacgctcacaagggcagcaggtggtttacaaggactatgccgctactaccataacacactcaataccttaggccggtgctaccccgatccctccaccggggaccgacgagccgacatgaagttgagtcgaccaggcatgttccaggcccgtgaccacctggccaatattgagggcactgacctaagatcattgatggataacatgctcagtgatgctgattcactaccaccccacgaatggaccatgcaaacgcagagggacatggccgttgaggcttgtctgcgcagccacgctgaacccacatcaatattagctattatgcgaacactcggacgaaccagacctgccccagaggatttccatccccccccgccggtcatttacagcaaccctccagggatggatgagatgaccctaggcctggagtgtggtgcatggaggagttgcgtatgtgaatggtgtggcacacgcaacgccagcccgggccgcttgcagccattggtcatttgttgcggactatgcgggcaccccatcagtagagaagatgatgttgccactaaacttaaatctatggcaactggactgccagtcgagactaccgacgccatccgtggcatcttgaacttgcgtaccatgagcacactactagatggttggcaaccagacaactcgtcaacatacacggatgtagtcaacagtcacgactttcgactcaccgctctgcatcttagtcgtattaaaaccaaggtgattgccttgccaggtcgctttaataatgaaacccttgagtggctatcccgcgcattcccggcttttgaattgctcaaccagccaagttccggcacgggctgcgcactgctcttagcgatcagcgatttgatgacactcaaagtaactgagtctatggtcgcactcaaccacgtggtgtataaccgacccgagtggttcccaccactcaccaacaagggtacaacactgcggcacttcagccagttacgcgcaagccacgacaccatagtgcaagccttaaccaatgatgatggtgatgcccttattactaccctacgcacacaagtgccacaaatcattctagagggtgccgcagaactggtgggagcaggtgcgtggcgatcccttatttatttggacagtgatactgttgtacgagtcaattatgatttctgcgaggcccttgataagggagctgtcatacaggccggtgatagggtgtatcaagtactccaactggatagtgtagggcccctagcaacctattatttacaccaaccactagattgcaatgacgtgatgggccaccaccaccgcgtagtgaccacagacagcatgcaattcaccttgccagtagccagcacgacctcaatagtgggtctacttgactcaaacctcacaactgaggttgtggagttgaacaaagacctcatgctgcgcggtttgacccgtgctatgatgcccaacttgacttttaccgacatgctggagtattaccgcgcggtcgcataccgtaagtatcacacagtcgacaacgtgattaagacaatagatgtaagtgccgagcaagcgtaccaccatgcttatgcagtcaccgtccttgcatcacgcgctaatgcgatgcgtgatacgacagctaaccacttgggtgacaaatgggcgcgtttacgtacaggcgggatgaacaaagctgtccagctactgatgcgcagtcttgggccggctttgagcctgacaagcgacgatatagctaccgcaatcgaagggctgagcggcatggctctaaacactttaaatagccttgcaaccggtcctgtgtgggacagcatcaccgtttgggcttatggtagtaaagttgatgcggttgacctatttacactcggtcgtgctcctgaccctgaggcggcacgctgtccgcacggcggtcccctagcaaccaaggggaaaaggatttgcatatgttgcgctggaccaagttacagtgattattgcacaacttgcatcccagagtccgtcaggtcatgttggcataaactaacacacacaacctgtgcactgccccatgatttacactgtagctgttgcggtgaccagaaggcgtgtagtgacccctgctacgattgcgaggggttagactcagctctagcaatgcaacccaatcaaatgaattgggttgaggaagggcaaaagcgtaagcaagaagggggcaaagagcgccaacccgggccaccacagagtaaggacatcaaggctaatgagacaggaaacaacaaggcccaagttccggccacatccaccacggaacaacttgtagatgctaagaaagtagcagctgctcttaccagattaggagcactaataccgctggacattgccgaggcaattgcctccggcacaggcgtaagtaactggttggaggacgttaatcgcatgggagtgggacgcttgaggggcgtaccacctggttcatatacactagaaaatacttggctccaggtgttaaacacagcaagcatttcccaatctcagcaagagtgcggcttggaaactcttttacaattaaccaattcacaaagtagaacgagtgtggttgctgcagtgggccgagctggcggttggacagcgacagaattcgggcaagcagctatggctctccacatcaatgtgcttatcatgtcaccagcaagcaccgcactccacgtcaattgccctagcgacgagatatacttagtgatacacagcgctgttctcggggcttccactggcatgcattggctagctatgcaagccacctcaagtgaaaggttgcctacgatgacgacacccataaccggcctcaaccctaactaccttgacacccgcatcatgactgtaacacaatgggcagctccagctaatcaattgaaacggctagagcaggccctgcaactagtggggatgttaaatgagaaatcaaacgtaacatggaaatggaaacagggcagcaagggcattatgctcagcaactcaaactttattcatgagcccgacttgggcaaatacagcatttggttaccagaacagatggcaccagcctgcgagctattaatcaaccccggtgttgcgcgccacagcccactatacacacaaggttacgatgtgccacatgggctacaagaggactacagcccgacgtacaatgcacaactgcaatcagctttgttagacatggcagccaccctggccatgccaggcttggagccaggtcacgagtggatgaagcgatttacaacagaagtggttgaatgtatcccaatagcaaaaggcaaagtcaggttggtgacaccacgacccctcaagacaggcgatgtggtgtatattaaaacaggcgcatggatgccatacagtgtgctagctgccggcggccacccaatggtgactgccccgctccaaaaaatggccgtgacagtcatgatacccaaagccagttttggttcacatctgcgtacactaatggccgctgacttaccttacttaaccgccagggaattcaacgctatggtagagtcagcgcgcgtgaccctaggtgtgtatggaagtggcaagtcaacaacgatggtgcaagaagcaaatcaacactacctactgaccgcggcaacctccggctcactcaattcaatacgcaagaaagccaagaggttaaacaagaaagtcactgtgtgctccattgagcgtgcaacatacgacgtaaatgcgtgggaaggcataacacatttggccattgatgaaggcgctgctctcaccgtgactcaactatatatgatgtgccgcaaaccagtgcaactccatttactgggtgatccattccaagtgggcacagttgacttcaatcctgctgccgggactagggatataacacctgcatacaaactcagtaaggtcacgccagctcacttgaccacagaaaatcgaatcggggagccattagccagctgcatcaatgctatccacccgtgggaaatcacatgcggagccacgcacaccacaagcgttaggttggaatatacaagttcagacttggagcaagtggttccgattattgtggcaaccgacccagatgcagtactagtacacaccgaagcatgcatggtgcgtttaaaatccgccttacgaaagcagtggaagggaccgagagaacagctagaacgtatattggagagagtacgcaagatacacgcgaaccaaggtgatgagtggccgagcgttttggtagtgcagtggcgcatctcagaaccgggcatagaaattagcccgcagtacaactactccgcactgactcgcgctacgaagcacctgacttgggtgagcgctggactgcaccccacaggtaccccactacctgagatggccgggagtctaccagtgggttatggctggtggactaatcgacaaccaaccttctcattaccaaacaacgtaagacttggcggggaggaccctggtgtgataagcgtcaaccgcataagagacctggtgacaaagaacgccaacgcatatggtgccgttgcccgtgtcgataggcatgaacaaacagacaccattatgatttccaaatatggggttcctgcattatctattgacgtcgacatcaagacaaagaaggctagcgtgacattaaaccagtttaatgttccaactgaaccaattataacccaattggaggctacttatacaatgcaatgcaaggacacaatcaaaccaaccttccaacgtaggcccactcaattgagccacgtggatgatgttatccatcgcctagcattgttggatcaattggtcggattagcttatggcagtgtaccattgccaataggaatggatgatgtaaccgcggtgacaggtcgtgaactagacaacactgaagttgatttcttctataaaaacgagccagtgcttaaattcacgcaaactgcaaggggccccttcatttggtggtctacagccaacagacacacagtggtcgtggcgacactgctgaggtactttgatgtggaggtcgcaggcgtcgaaacagcacacttatatacaccaagtttcgatgagcaactccccatactgcacacccaccacgtgtgggcagggcgtctacgcaaattatggcgtttccttgaagacttaacggtggctggcctccagagtctcggtctcaccgtagagactagcacaactagcaaggccgaacgctggttgcatgctattcgccaatatcgcgaagcccaggtggtgggtactggagcccacgtagttgaaacggccataccagccataattggtgaaacttgctggcatgtagttaaagtcatgaacgcacaagggtacgtgtcatatgttgtggaaagcgcaacggggccgagattctgccgggcggatcagacgggagacaatggtttaagcatagggcccgccgagatgacgtacatggcgatgcaaagattgcgcacattacgttcctatgagagtacaccaatcggatttggtgatggcctggtgcgaccattggagtggcaccaccaacacaacacaaaagtcgcaagactcctaacaaatgtggtggcgcaaacgactgcaaaagccatgagtctggagccaccaactttatacattggcgctggcgcgccggctgaaaccaaggcattgatcaatgcagccatcccacgcgttccaattgaagctgacacacacgcatactcaccagtgactgggtacaggctcactgagttgtgtctattgtacgtggtgcgtggctatatgccaggagtggtcacatgctacacaccgcatgttgatctgccattgcaattaagctggtgggccgctgtcacaagtggatcattgcatgggaacccacagctgttggcagccaaacgcacttctgcggaatattcccgcaccattttaaccaaattgagtagtattcataggacagtggccgacgtgggtagtcttagtgagcgtgaacaattggcaatcacagccataagtgatagagctaaacttgcacaagccaacctcgatggagagactgtttttgtggcattagaccagcagctcaagttaaaaaccgcaagcatttggttaagccctcaagaggtgtgtatggacaatatattacaggtcgtggagagaggagtgagcacgatttacacggccatgccctccgtggctctagaggccgaaataggccgtgattacctgggcaacagttacatccagccggacggtgaattgggacagtgtttcagacgtatgagccctcttgtcgtgtcaactagtcaatgtattcagcctgaattaatcaccagctgcctgggtatgagcatttacagactaaatgtgcgaaatggactgaatcttgattattacagttctcccccactaaatacacatggactgagtttgcgacgagtgcgattgccatacattcatacaagcgcgctcatagcctccaggaagttggttgtagaagtgcgagatgctatgatcgaagccagactgctgcgccatctggaattacgcatgcttggggcggaagtctcatttgatgatctcaaggcaacggcaacagtggcgttaagtggtatgttttacactgcaaccaatgttgcaccacgcgagacaattaacccggatgtgatggtagatacagcactctatgcatggcttaagcatcatgatgtactcaaaggtctcaaccggggagctctgttaacaagaccgcacaacacagggttcctttctgacacccttcagcatactaaggacgtattcggaggtctagttggtttgttgttgaacgctactggattggatggcaacctgcttcaattggtggacgaattgctgccggagagtgatttcgatgagcaaacgaaattccaagacttacaacccagactattagggctggcacgaccgattatgcattaccgactcaccgacggcaaattggccacagcaatgtgcaatgttgagtccagtgtggccaaacgtggcgcgactaattacctgccatcagggagagcccttgcggccgcttgggctagtcctccacctatgttgcccctcataactatggaagggcccgacgatttaattgagtggttcgctcacctgggcatagaaatgtcgcacacgtggagggtaaattgtccaacagacgcaatgcgggacatgatagaccaggcgatcgaggactcttataacctggaaatgcaagacccacaagtgcgcaggcgagtgcttgcgttacgcaaagcgatgccagagggagtgagggtaatccggtccagcgatgatgtatctcgattatgccgtatatacgctgagcaccttggttacaattggaacctggaagcaacatccggaccgtcatacaaaatggtcagtgccaaggagttattggccaacttgcagatagaggctcatcaatgtgaaatgcacatacggcaattcaccctcacacctgctggcaccttccttgctgatagtttacgcgagtttgggcagctaaggcatgaccaggtttcatccgactatatgtacactgatgctgacattgaggatgttaagacatgcattaccggagtgcgtcattcaatcaatcccgacaccatactcagtctgcaggtgatattgtccgatctcattaattcctttacgccggtagcagcaatacagcggcatgaatacagcacgctgaacgtggttgcattgagtattggttcaatgggagactttttgcccatatatcacgtgtgccgcacactggcagaggctggtgcaaatgtggtgttgcattgcgctgatgaactaacacacttagtgcaaccacccgtcaagctgggcaagggtggctggagtatagagcaaagcctgaccaaatacacaaaattacgagcgggtagctatgaggagcgattgcaaggcttgggctcatttattcaaacaaactgcttcacgcgactggagctagtagatcatttaggttgcaacctagtgcttggcacaagcatcagtacagagtcgtacttgctcgcctacgcgatgaacgcaccactactgctggtggatgcacttcgtatcggtagtgacacggtagctgagcgtatatcacgccaggggctgagcattgtaacagcagcatacctcgacaccaagtaccgtgcacttacacaacaacctttggactactatgccatgatggccacccgcacaatgcgcgcttccgtaaccttgccagtgctagcagcaaacacgccgtcaatcggtggatggggcgagccattctggggcgaggtcaggggacaatggtcaagggaactgcctaatggtagtgttgtggtaaccgcgggcagcatgaatgatacatcatatttacgtgatttagcctctctaacacagagaataacgctacctgagggtggtgtactattagtgcaggctaaaatacacgaccaaatggatcccaatgcaagagaagtggttcccttcaccagcatggactatttagccactctaaccaaacacaccaccctaatttgccacggtggtgtgggtaccattatgtctgcatgtcgggtgggcgcacacttggtgattgtgccatttgcctttgaccaacacagcaatgcagggattatgagcgagcacggagcactgcacgtggcaagagaccacattcaattagaaagcaccctgagcaaaatcacttcgatgggtccgatcagtggagcattggttgagtcgactaagcaacatacaagcccaactgctatggcaagcgcattgtgccaatgcttgaatcaactacttgaatggaatttgcccagcgaaccaatccaaccacctatggcagtacaacccacccaacaaacagctcaatcactgatagcagcgatgggtgctgtgcaaataccgacacccccccggttgctgggtcgtcaattgggagtttactactccaataaccaacccaagccaaaagtgaactacgacccaccaagcatggggccatgcttgacggacgctatcatgcatgattgcgtacaccagggaccacttgtgccactcagccacatacaaaacggtaacgggtggttgcgcggcgtgccacctcacctggtgcccgcttactcagcggcccgaggcgtcaatctgctgctgtacagcgaaagtcactatgaattatacttcaactacttgaaccgcccgttagtccgtattattatggaacagggacacgcatgtacatttgacgacccaggcaatctaccattacaatcagctcctccaattcttggtcaaaccaaaactgccgtgacatatgggccgatggcactagatggtagcgtttgcttcggcggtgagttgacattaactcaagagcaggcgggccaattgtggcgcaactacattgacgagtgtgctccaagtgatgtcggcgccgcaatacaagagtactggcagacctatgtatgcatgaaatattggtccagccgaagacataccctggacgtggtaggaagtgtcttgccactcaatttgcaaccatgccgtgatggtgcgttatgtgtggaagcaggtgaaatcacactcggtagtgtttatgccgtttgtcaccaagatggtacagtgacacttgctctcgcatgcatgcgcggtgagtcagactggctgatgtactctaagcccacaacaagccccaccactggtgtggtcatcgacacacgcgtgcgactctttagtaaggggaagaatagagcaactactggtggggccaagagtgcgaaggcagcgatcaacaaagcgaccgcggacttgctagccagagaaggtaggcaactgcaagtgcaacgggccggacaagtgtgcatagcagacattttagtagtggccgagtacgataattatacccaccaccatgctggggacattgaggtcctagacatgtacgagccaggggctatcgaatggtactacccgccgcctgatttgggagagatgcgatttgatgacaggcttcgactccgcaccgagccttacaggctgtgcttgaccaagggtgagtggtggtggtcctcccgtatattaaatgaacgaccagaagacgtgcatacgtgggcgatattgaatggcttggcagacaaccacggcgtgtgctcctgcccaatagcagctcgccccccggcaattcttggccaagttactgacactggcgtagtgttggacacattggaaccaccacatagtaccacactcacgccaactggattgcgagcgtggttacgcgatgcattcgatactaggttggaagcaccaattacagatcgtaacttaacagtaagccgagcacagctgccggcgcaattatcgaccggagccaccccgccaatattacgagtccctctggacggacggccgggaagcattctagtatggatggttgggccaacaatgtggttgacaagtacagggcatctcgggtgtctgcgcttagaaattagtgacacccaagagtacgttacgacagtgcacaatatcaaggagtatgtgccacccgagtcatggtttgatgtgcctccatcaacagtggcaagaccagttaaaagcgcagaagcatctgcgcgcactgtgcaaagtaatggcgggatcgacgcattacactatttaaattacgcggccgccgtgagtgcggctcgtgcagtgccgggcttaattgatacctgcactgaattgtacaggcaagtggcagaggcttgtaacacaatgaccaaacacgcaaaacataaaatcgcggtggtgactgcacatgcacaatacaatccgcccaagaagtgcacagccatcaaccttgtgatcaatgggcaagggtggaagcaagggtggttaaatatttcagtcacaacaccattccgcaccgggcgtgaactagctaatttgcggctagctccattattacatggcaatgccgatgtgatttggataatcactaatggtaatgatataggtggcctcacgaaacaagtggaagcgctagctaaagcacccctggtgccgggtgttgccacccggcaaggtgcgcactccccaatcggtgcatatttagtcgcttgccacggcccggccacactggtaggtcacaaggagacggcgcacgcagccttgagcaccaccggttggtggtatggggcggacgaacactggtttatgaactatgcacacaatgaaatcatctgtggagcgggagagcaactgttgctggaaaagaggttcctacatgggatggggactctaacagcgcgtggttcactaacccctcaaccaatttggttggcgggagacctcctaagatttgatgaaaatcaatggcgtgtgggaccctcaattacaccaacaccagcccaatgtggttcacccctttatcaagtgagcggaccaacggtttataatgaggatgaagcaaaggcgctccagttagtgttaggactgctgcatggcaccaacctacaggaggggatgatgctgctccaagaattggcacgtaggggcgtgtggcgcgtaggtggtcgattgggtacacacaatgtctataggacagaattgaccagctcatccataatgcttatcgctaaagccctcaaccagcgcgctcttgaggtgccaaccacactaacggcagctaagggggctttggacatagctacaagtagtacatatgatagtgtggacaaccccttgcgaggaactggttacgtggctcattgtatcaacatcacatcagtgctaaagaatggtgaggtcgtagcgcaaacaaccgatcatatgaggtctgaggaggacgtgccggccgcagaccgctctttataccggcacagggaaaccggaccgcaccgtaaccacaccatcaggcaacttcacaattgcgactatccagcaaacccaaccagtacagacactcgctgtgcaacttggttagcgtactacataagtgtagcagacaccattgatgctatcgtcgcccagcatggtggagaagaatggcacataacaagctacgcgcaatgggatttaccagctggacggcaaggcatcaacatcatctacaaagcggaggaagcgcgaccaacttggcacaatgttctcatcactagtagcacagggtacacgactgaaggccgacacatccgactgctgccatgggtgttgtgcaacgggaaaacatggtggcgatgcgtggcaggtagagaccagagcaatcgtggactcgatctcggcgtaatgcaaggtaccagcccattgccgcgggtgcgcggttggatagtgcaagagaaagtggatggtgatgcaccagtgtacctaaacaacgctttagctaaaggcggcacattagtgcacttggcaaacaggttcgtgtgggacatgctcaatgttgcccattggtacgggagcgacgaacatttcacgttgcggtttgcgcgaaattacaccatacacaccggtgtggagatgtcccaagattgggtcatgcccttcaatacgccagctcttttatgcgtgggcggactcattccggaacacgcaagtgttctcgacagtgtacgtgcatgggagcggcagtgtatatggcgtaataaagatggtcagatcgtggttggtgatgacggaccattcagcggcgtacgtgagagccgcacaggattggcgaactacttcagctccctattacgtgctggtgacacaaacgctctggttgacacattgagtcggctggccagattagcagatgctgcaccatttaaggaaagcgaggaagtccgcagcggtacaccttttaaagttaaagatgtggatatcccagtaatttgtaccctactagcaggtgcccacaagccaaggctagtgagcgctgcgaaagcaatgaaagaagcatgcttacggccactcaacgccggtgactggaaggaaattgaccaagcaattgagacgggcacatggacatccgaagaaccagaggtgatagtaacacgacagaggttaattaacccaacaacctgcacttgcctatcagtgccaatgattggttcaaggaatccgcctttgtcagacattgacctctataagattaagcagcaaacacaacatgccggaccagccaggacaatgtggttccatgagcaaacgcaacagcaacagcagctcacgcaaaccaagacaagcaatataacggcagccagatatacgggcccaatcgcatttggcgtaacgcgggacatcacctcaagattaatgaggtcacttggagagagtgtagctattgaccacggtgcacaacctggatgtaccaaagatatattgctatcacatgccatgcacggggcggacaagagcatgcacgcggtattgcaacgcacccacgttcctgctcgaatgatcctgctaacctggggccccgagacgtgccccccaacagtgccttacggtggcaatttcatgctcggtcgaagcgcatgggaccgtgatagccctgcagagttgcgggaagtggtgcaagcccagcgtgtggactaccgcactgggaatggccacccaacctacatatgcaacagcttggacgaattagtaacaacgatgaaggagacaatgaggcgattccgcagccgggcagccactaacaatgcgagccctaaacaagccagatcttgggaagcaattctcgaggcacaagggccagaggtattcgaaccaaggacttggcagggtgactctatagtggggcaagcgtatagccagccgatgattagtatgggcagccacagcacgtactacgaaccaggctacaggtcggacagtatcaaaagtgaggctgacattgcatattggaatgacagagaccagacgggggagatacacttgtttctgagtccccaccctttccggtctacagagcaaccaggtggcactttcactagttccaaggccacaacgacgcctctgccccacgacgcaaggccaatgcacaccaaaatgtatggaggtgaattaaactgcgtaacaacgcgactaggttacgctataagttacaggaagcacaaaccaccaccaaattggtcaggtgaattcgggcgcacatatttcaaggctgagcgcaacatgatgagtgcaagcaatcgcaaagataaattggggttcgtgaccgaggacattgtggaatggctccgcgggcgtagtggcattaagagcatcgacaacgaactagataagatagaatcggaagggattggactccacccgatcaatgcactgaacgtccatcggaagttggaatcactcctcaaaagcgcaatgaaagatcagccaatatggaagcacaatgtgcgcgcaatagtatggcaacaaaaaggaattaccgctttgtttgctccagctttcctgaaagctaaacaaagactcaaagaactgttacggcctgaaatcgtctatgctgatggtttgacaagaggcgagttgtgcgaccgtgtagcccatgtaccaaatgagggagtgtggctgatggaaaacgatctagtgcagcaggacaaacaaaccgatcaggatatgattgattgtgaattcatggtctatcgtgattggttgggcgtagacccacacctgttgagtttatggcgcacagctcacaaccactggagcatcaagggtcagcacctccggggtgtgttggacgctatgaggcaaacaggtcaggcgacaaccgcactcgggaactacctggtgaacctcatgtgtcatcagaggttcgtcgcgcggctgggacagaggctgttactaatgcttggtctgggtgacgacaacttaagcttcattaagggtcaacccgacactgcaggattgaagacggagattaaacaatactgcaacatgcagtgtaccacgagtgcaactaccaatggcggtgtgttcctacgacacatcgcataccggacggagcagggctggggttttggacccgactacgtaaggttagataagcggtacgctgtgttcaatggtaacgtgcagactgacccggcagcagtgtatggaaggatcatgtcatattgctgcatgctgggaccgaccaaagcggtcaagggaataatcgctctacaccacctcccaatcgaacccgaacatgattatgatatggcattgttagtgcccgctatagcacaacaatactcatgctcgctcgagcaagtcgaaacccattatagcaacttggtgcactcaatgagagcagccaacacccacatttatagctggcagttaactggcacagcacggctataa

SEQ ID NO: 1224 - DNA, 10620 bp, Hymenoscyphus fraxineus endornavirus 1
  source 1..10620: mol_type = other DNA
atgtacaataccaacaccacaatgacttcaacaatgacaaacactacgcccgccgctacaaccaacacacacaagagggctattggggccctctataaatataccccattaaaaaatttcagtagaggtgaatactatgacaccaatactgaaacaccgcttaaacaaactaacaatgcgtttaagctaaagaaaccagtcaagagaattaatcccttgacggtggtcactgacccatcagcggctgtcaaaattggaggttgcacacaagttaaagccagcttcaattgttggcaatgcatattcggatatgacttgggaattgataccccagttaggatggaaatgatcaaaatgacagctgaatgtgatcctgaatcagcgagccacattcaggtacgagcatggctgattggtgatatgctacatattgctaatcctatcggattgccagttggcccaccatcagatgagctttttaaagcccaacgagagtttgtctccaagccgattgatggttgcataaagttgacagcccttgttgacttatttgatgatggcgtgctggtaggctatgctcccaccacgctacttgataagttggctaatgacacaggcctccaattgtctgatattaacaccaatcagtttaagaattcaatatcaacaatggttaataaacgtgtcagtgatccgttaacaacattcattggccctccaattattcttcctagtagttgtcctgatgatttgatcaatgacctcaacactgaattcgggaatatgacattcatcaggggcaacaaggaacaccatccacatcggtaccataatgctagtcgaaaggctgtgaccaacttaatctaccggtggcatgggcatcgctgcctcgtgtacgatattgggggcaacccagccgcccaccttaatgctgggcggctaaatgtgcatagtgtttacagcaaatcctcagctgctgataacgctagacacataaagtgggtcaaacaggctgtcgcctgggctaaccgcaatgttaattcagataattctgatagcacttacagggcgattgcttcatctattctgacagaaaacaatgccatgtggtgtgacaaaggggtaaatgggtgcgtgcacgccagcaaagatggatcatttgcaatgtctgttgataccctgtgtcatattgaagtagacgatctgtttgatttctatatgaaaaataaggtaatacatgcagtgcatgcttttaccatacccaaggactatagctatgcttcgagtggggctctgccatacaacgaaggtcattggtacagaaatagcagttcttggactatagaattcaatggtgaaagtttgccatatacccaaagtactgaattaacaaacaagtacctaacaataccactctacacgctaggggagatggttgtttactgtaagattgggggctataaaggtgctcacatgataattgagcactttgtgatgcctaggagtgagttggattcattatatattaagcatgtgacttggtttaatactgacatggatgaactattcgttatgatccccaaggtgaatatggatgagtccaacacattgatggggcgcactccctatgaaatggagaaagttgtcattaatgttcgattctatgaacgtattctaaaccggttaatgcaggcatatacttgggagtcattattgtcctatggttccggcttgattggccgcgtgtatgccacttccagtgggttgcacatgaagtggaatttgacaaacacacaagttaggcaacattgtttgattgcctattggacaactaatcgattaaatgagtcaatcagaccactactagcccaagcagaacgaaaccaaagagatcctgatttccttactagcttatggaactcacttaaaacatgggttaaggactttgggtcacagtttgatccgtctgggaatgttatattgcaaaaatttatagctgacaataagggcgatacattacgcctggttcaactattcaacagctccgcaagaagcattgaatcattaaatgtggcaacgcaaatggtacactcaagatccgtcacagattggattgccaccagcacaggagttacgtacaacaaccaaaatttcaacattgataagtggcggttatcacaacctaaactaaactaccggccagttgtttatgatctggtgcatttccgtggcgcgaagttcctaggtgatagagtcaagtgcacgccatcaaataattgcaagcatgaccatgggatataccatctacacatcctgaacgcaataaagaaaactgggaagtgtagttgctgcaacgttgaaagcaatttaaaccggggtggtgtttgttcatgttgtagtgaacgatctccctgtgtggggaaaaatttacgctgcccccatgaacacaaccattcaaatgatgagtgctgcaacaaagaggtttgcttttgcaacaagccaaatagttgcaattgctgcggcatgcctagcatatatgaccactgcgaagtgtgcaaattcaccccagcagcacaatcaattgggccaatattcggtaacccccccacaaatgggcccaataacctgtcaaagattaaccacaacgtgccaaatcaagctgtcaatggaccaacaaacactacgccccctgtgacaaccacaggccttaagacttttgctttcgttcacgggaacacaagcaatggcaccccccattcacaaaccccaattccttctagcccagttatcaatcccgtggctgagcccaatgatactgtttacaaatttaatccagcaccaactgattctgatgctgtaaatagtgaagggtcgatcacaccacctgtcactgagcgagccaaaccactattcgacacaacagttagtgactttgatgccttagccagtaagaattgggctgatgattcagatttggaagaaattgagtatgagcaagttaattcaagctctattgctacgaaaaatgacaatgaggaatctatgctacccttagtgccggaagatgagattatcggtgcggaaaatatatcacagatacgctgcaccaacgttactatagttgcaaatcgtggctatggcccatccaatttaagcttacttccaccaaattatgaggggggcctagctgtgcgagtgacaggttacaccgatgttccaggtgatggtacatgcggcgcacatgcacttgccaaagcatgcgaactcccaattaagtcagtcaagacttggttgggccaggccgtcaataaagatgattggcaagatgccgaggagctcggagcatgtgcagtagcatttggtaagaatgttattgttgttgaagagggcatcaccactttgttccgtggttcagacagcaatgtggcagggtcaattgtttttgctgaagtgataaccactggtatgcattgggtagctggaaattgtgacatccaaagctattcttcactctataacagcaaaatccgtgagaattataaagcgctattgtcagcatgccagctaactctagatggatcggtctcatcagcgtacgcgtaccaccactccactatggatattgcacaaattttagatattgatggccaattctcagtagatgacacttttgttgccatccacaatagaggcagcaagcccaagtgcactatttcaaacattagtaacgggataaagtatattactggtcccacagggtcgggaaagactactgctgcatttaatcagatcaaaggacgtgtattaattgtcaccccattgcgctcagcagttaccagcacctacacatttctaaaaaagaagtcagtgcgtgttattggtagagcagatcaggcttggttgcccccgaatacaaaagaaaatgaagtgttaaacgcagatgtggtgattttaacaatggaaacattgtattcaggcatattcctgtcgggaaacaagaaaaatgtgtaccataaccttgtaaagtcacggcacatcatatgcgatgaagtccatgagatatcaccgcattatgctaggttgatcgcattcatgccccgtgagaaactctatgtgtgttctgctaccttacctggtattaagactagttatgaatgccagcatgatattgacacctgttttgcacagaaaaactatcttaaatcgtactttgatgatgctgttaagaacaatagcattcaaaagggagaatgttatattgttccaacagttgcgcagtgctcatatgccaaccaaccaaggcatattacatcacttaactctaagactatggcacaaattgatctaaatacagttaactgtgctattgccacgaatatcgttacaacgagtgtgactctgccaaacgttattgtaatgactgacctcggtgagcgcacacaatacaacatgatatttaacccatacaagactgaagacccaaagaagatcagattcgctaactacacacagcgcgactatagttgggctgagatgtgtcaatcgagaggtcgcattggtcgagttaagcccggcaagttttacggacccccacctactcctagcacccaacaatccaacgttgatgagatgctcatgagctgttatgttgggtcagggtgcaacttgacacgcattgactcatggaaattacttagccgattgcattttaatgaaatagttgattactttacaccaatattaaccaaattgcaagacaatgatttaagcaaccagttccagcaatggcaagacaactatatggagcttttagcatgcaaggacactggtgttagcccagtctttgtccaggattcagttagcaaggaaaatgtgctgtccttaattagcaattttgctggcacattaaccaccagtgttgttaggcaagggccaatgcgctataactgcaggattgaatgggaacatatcttaccgagccaacattatagtaagaacgataatattgactttgataacttaacgataacaattgactcaacagccaacctaatcaatctaaacacagatgataaccaaaccctgtcatcaaagttgcggatcttggccatctcgcaaatcttaaccactattcgcggtcttagagaccgcggtcaggtgttgatgaatagaaacaaatggggcgatcaaaccggtcaatacattgcttattcaaatttccaagaggcaatcaatttatcaggtgtgaaattaggccctacagagataattggtttattagactctaatgcaaaccaacttattcttaccacttacagcaagtcaacaaattggaaagacgcagttcttataccaaattatagaaccaaccactatataacaatggtcagtgaagctagtatactacgagacaataatattcatgttttgaccactctacaaaactccacactgatagctgggccgtcaggtagtgggaaaacaactaagatgcttgagaacaatccagggacacatgttgtgacgatcagcaatggtcaactttatgctaatccaacttggatcacacctgcccaattaccaccaaaccaagaggtagtgtgcgtggatgaagtaggcttaatggatgttgcgacattaattacgatatgcgccaaggcaaagaagattgtgtgcactggtgatattggtcagatagtacacaacactaatgaagaaataaaactattcacaggagtgaacgataccatggaactgatatcagaacacatgactgtagaaaccctgtcaggcacctggcgatttggtgaaaccacatgcagtatgttaagaaaccttggttttaacgtgacagccaatgacaaatcaaagaaggacactgtcaatgggcatgtagttaattacaatgatttgaaatcatatggcaaactcctgattgatacctcacctgatgctatcatttgtagcacaaacaagcttgctcgagttttacggtcaattacgaagctgccagtattcaacattacaaagtgccaaggcattgaagcccctaagaccttggttttgcttcaggacattagcgccggttcattggcagaccgtgacttatatgtagctttaacacgtcattcatctgaattaacaattgtcgttgacccaattcggactagcattctaactcgattaaaggtgcgctcacatgacctcatatcatatgcaaatgcagcgggtggtgcaggttcaatgaccctgcctatgaaggaatacctaatccggctgatgtttaggcaaatggcagaagtgcgggtggtagctgaaatattaggcattataactgcatggcaaggtaatataatcagcaataacacactattagcccacatggataaccttaatgaccgcaaccactcacacttcaaattttcagaggttggttttgatgacaaggttgggtgtgacgtggttactcttagattacacaagaaacaagtcgtcctttttaagtcggtacactgcacgccatcagataatttactcacttgcattaaccaactacctatgggaacgcttgttagtagagctctattgcgtgttccaggcgcaataatcaatctgagtgcttcactcttgcgcaagattggcttttggttaattaacttgatgtcaagtgtatcacacgtacttgacaagccagtggccactgttcctgaagaaattgagatgacatcagtgggtggtaaactggacctgactacaattatatggtatgctttgactggtgccaaatgggcaatagtcactttacgtagcatattgttgaaagccagagatacatgctattcttggaccaatggtaacacagctggtgcagcagtaaagaaactaatgctgaacatgctatatgataaagatacgaatacctttgtgggttacactattggaaaaaaattaaaggagctgctgagtattttgtctagcagtgccatattagcagggaaaggcttatggacaatcttatgcacaatatataaagcttgtgtaaatggtgtcaaatcgatgtacactacagctaagaataacgcagaatggatgagaaccagtttcctagagatatatatagatgagtcaggttctagcgacactgactctttctacatggtgccagatattacccacctagatgacacttggtcagacacagaagaggtgatgaagtcacttatcccaggtgatgaccaatctatggttgatgagttggtgactgagattgaagaacatgaagagaagttaattgcagcacaagccgctgaaagtgcgcagcagtgtgaggacaataaagttatggatgaggttgatatgctatttgattttgaagaagagctactcagtgttggcacaccgcctgctgaggatgacagccagaaggcaaccatgcccaatgtcaatatatatgaccaaatcagcaatgattatactggtgctgcgacaccacatgggacccaagattcaggtgcagatatctcgcaaatttctccatcaccccatgacgttgagcctgtcgatggtcaggactctcacagcaacccacaaagtacaacacatattgagcggaagcgttgtaagtgctcgactattgaagataagtgggagtacattcaaacactggaaactgaagtcaatattaacaccttcacacctaatttctttgggagatcggtaattcaacgcaatgacaaggggctatccgttaagttgtcgatgcctcttttaccacaactcagcatggttactgaacgttgttgtgatgacgatacacatgtagtgatggccactgataaggatggcatcacatatttcaaattggttaggtgcggtgaagggtataacttatatgtgcagccgggatcaggtaagattaacccccagatgatagcccgaggtttacagtacatcagtaaattgggtgggtcgcaaggcccgtcatttatgagtttgattaaaaacatgctatcagctacgaaagacttcattgataagttagctattctgagcaaatacaagatcaggtatgccctgggacaaatcactatgcaatcattcagccatgatgctagttgcatacatgtgtaccgtgccatcaggtcgagtttaccaaaatcctggtttaggagtggtattgcagatttaacgatacacagtggtaccacaatctcaactattgaaatcaagagcgttgaccaggtaaatagccacaaggatatactagttgtgatttaccaattcttttcacaaactacagtttcagtgttttgtaacactgagtctcgaatcaactttgtggggcgtgttctacgcaagcccgtggacgaatcaatatctggtggtgacaaaaatgctattagtgctttattacagttagggattgatatccgtagcatcattgaacgtgaaaatgatctcactgaaactgatgttatgaactggttggttaataatcccctaacctcgctgtttggagttagctcagaacctacatatttgagctgtaaagaatcactttcagttgaaaaacacttgctagatgacttcaagtattctcttgatattaagggtaaagagaaggtagctttttgtattcccagtggtcatggtaaaacaaccaccgtagcacgcattaggcgtgagatgcccaatcaccgggttcttgatgcagatgaggtgcaggaacaggcaacaattctattgcttgaatttgacgataagatgcgcaattaccgggaaaagattataaaacacattaagtccgatggtgactatgatgctttatttatacactccccaatgtgtgcaccgccaggatataggccgatcgtgttaatgaatagcctagctgttgttccggctgatagaatatggtcagagaagaatgtagcacacttaaacgtgaattatactgtgcatagtgtcaaaggctataatgagctatttcatacctgtcgcggttatttagaacggcgtctaagtggcgatatcactttagaagatggatctacaattatcgacaatgtcaacagcatattgggtgacagttttatgcggaatgcaccattctgcgacgacatattgagattgccgtccggaaagaaggacaagttgctgtatagcgaaggtgtccttggtgtaggacagcaacgcgttttcaagactgggccacacgtagaagtaatgcggcctactatcaatagtgtgtcaacagcactaccaaatgcaattaccactcgcctgatgggaagggttaagtaccgcaccatggacttaaagatccatgattatgatgcgttactaagcaagatgtttgctaaagattataaatacaagttgcgacagtatgaggaagatactatcaacttaaattataaagacattttagcatggctagtcaacaaagggaataaaatagaattgctagataatatggtacgcaacgtgctaaaggatgaacatgctactgacccagcgaatatcagcgtgcattacaaagttgaaaacctaatgaaagagcaagtgaatgacatacttgatcaagttggccgtgtcattgtttggaacaaccaaaacattaacatgtatgcctgcccagtcattaatgaagcaaaagcccggtttaagacgcttcttaagagcaatgtaatctatactgatggtatgacaattgaagaaattaataattcaatttcggagtataggggtagatggcttttagaaatggacttgtccaagcaagacagacagactgacgcccagatattgaagtatgagtgggatttaatgagaagactgggtgtgccatatgacttaattgacttcatgacaagtttcatacccacgtttaggattagagggtctggcagggaatcagcgaagctcccagctatccattttagtggaggtgcgatgactagcttaggcaatgagattaggaacctcttattgctatctgactgtttgaatagcaagtttgtagcgatatatacactaggtgatgacagtttggttatcatggatactgaacctgatttgaaattctactcaagagttagccgtgctagacataatgttgaaaacactgctactgcgagccggacttgtgcgttatttctgcagctaattgtgtgccgtaactctgatgatagtttttactgctcacataattttgttaggctgagagagaagattgcttattcatcatatccaaatacaagctctgattggaaaatgaagtatgcttcatatttaatgatgattggttacagcacacaaacaatggaggcaatgcagtggtgtgggtttgtagcattcccaacccttggaacgactatgtctatgcgagtcagtgctaatgccatatacaatgaggtaagtgaagaagcaatattgtcggttataaatgacatcatcaacgctagacaccaagaatctgaggcaatcttgttggatgtgcccatggtattaagcggcaacaagttactcagcggctttaaaaaagctggggattacgtggataatcatgtggctacttatgagagcatagctgattatgtcaataatgtacagtcatga

SEQ ID NO: 1225 - DNA, 11946 bp, Krauss' spikemoss associated endorna-like virus
  source 1..11946: mol_type = other DNA
atgcccatcatgtcctcacagcgcacatcacatcgcacctgcggcccctccgatcggaggggctgcgatattaatttaaaaaataaaaagttatcagctagacatgcccaaatatatcatgttggcatgcaaccagctgataacactatccccgaactacaattacgacactgcaaatacacagactatatgtacattgacacattttttggggaactggcagacacggaacacactgactgcattggcatcaatggaataattaacatctaccataacatgaaagtgtacccgtgtgccagcaaatttacaatcgacaaatttaacggtaataccagttgttacatcaatggaaaatatttcattgacacaaaggacccacccgccgagtctgactgcaactactgcccaaaacgatacagaaggcaggtgatagctgaagtcacaaaacggggcaaacaatccatgttacagtggctcagtgaaaaaagtaaaacctttccgattgggaaaatgtcccaggtttttgacggtgcattggagacacttcccggttggtacattaagtgcaactgttgtgatgccatgtcctacatgccactatctacgttattaccgcacacactcacccgtgaacaactcgtgcacgtgattaacatactacaatgccaaaccatgaacccagatacgggtatgttggacctagacccggaactgtatggcttcgaagcttcaatgctgggattcatctttaataacgctaagatgtactgctacaattgcggtgctcctatggacgaatacacacggttcgttcccactgagttcaaacacctagtacccattccacaagactatggtatacatggcatatccttagagcaagcgaagttgtgtctatacctagacaaacccccaccagagtccatagacctggcccggaaattgtacacagaaatggctaacaataatataaaccaccaactttcccgcttagaaattcaatacctcaactcggttttagactgtatcaacactgataattatagacttctacaaaggcacagtggtgtggtattcaatagcaaccaaaatttgatgagtgccaacattacccagatggaactggaagagattcttttaactgcagagttcagcgtgagtgctggtggtaatatctatgcacaaccatcaaacatgaacgtgtaccacagtttgtatgacatcacaacggccgtgacaacttccacatggttctcaaccaccgagctgatgttaaacacgcaggatccaggtgagaaccaagtgatgctactgaatgccagcaccatatttgatgtggaaactgcaatgcttgatgagtcatatgtacttgtgcctattgtgcgcgaaggggaccatgtggtgcaagactcacagtacatgtacacagagtcaacagggtccaacgtcccagtgagatggaataagaaattgattaatttggtcaatggtaattgtgctgtacgcctcaacggtgatacgtacaatattcaaaccatcaggaacgcagaaaaactgtgtatcatcaaattcaccaaaactcaaacaccggacatccggatgctcgctggtaggagaaaactcgaggtgtacttaccagtgttggaccctaattccatattgcaaacatttggtattgtgggagctgaatggcagtacgtcagcatagatgtagacttaacttatagaattttaatcaacgctttatctggtaagaaaagcttggatagcatactaacttacgtggcaggcattgccagcaccaagtattcaattggtggtcacatagttgacctcaccaaaacaaacatagctgaaggtgtgccagaattgatatatgcattaattataatgaatgacaacaacagattgatggagtggtgcaaactgaattacgtgtccaacgtgagcatcactaatgcaacaagtcgactttacaatttcattctcaaccgatttgtacgccaaattcacctcatcgaccaccccctgattaacaaaataaatgaactaattaagaccagtgccaccatgatgtttaaacgagacagcatcctcctcaaagcacatgggagtgttaacattacaaacttgttggcatttgaaatcattgacaagatagttgatttccactcaacttccagtccagtggtgcgtcaccccaacaattgccaccaccatcaattggcttgtaatcatatggtggattccaatcaatgtgcttgctgcggttatgccgctgaaccaggttctacacattgtgcgtgttgtgctacaagtaggatttgcctacacaaatgtaaccataggtgcttaaaaccttcagatcacatgtgttacaattgccaagtggcaaaaaaaagaagccaccatgtcaaatgtaggtgctgttcggcaatgggctgtgccgaactttgcacagtttgtgacaattcggaaagtgtcgaactgccgccagtctacaacaaagaccacaaaatcaaacctccccagccacccaaaactaaaccggggttgaaagaaattaaggcactaaccccccccacaacacgcaaactggaagagactggtaaacgcaccatagttactgctactggttccaaaatagggaagaaacaacataacgttgtgacaatttcaacagacgaaacgctgatcatggcaggtaacatcaaacggttggaatccttccatgacctaatgctagtatctgttgaaggttccatgtatttcccatacatgcccttctatggtgagcggaaattgtctcgggaagcttttgataaccacatagtccaagctgcaatagagactgaagactattgtgcatacttgtgtattgtgaatcaaacctcaataactttacaggaactcatcagccaattcggttccaatccctcaaccaacctgtcatacctcaaacatataatcgctagtttgcatttgaactgtgtgattagtgtaaatgacaatctgtcatacttactcaggtacggggagcaactacaagaatacctacacattgtccactcaagtgccctgccagacaaatttcaccatgaccactggtttgttggtcacccaataacgttgactaagtacccaaatggttattgggacgcaaaagacatggcaggagtgttggatgacccaaaaccagaattaaacgtggatgcaatgtccatcgtagagttcaccaactataagaacagaatggacaaggaatatttgaccacaaccatgacacaccggaacgacgacgttaaacgacctagtttgataatgttcggtaacagcactttcctaaacaacaatgaagggagggttcacaacctgcggcaaggaaaaatacatgtggaaattccggaaaaatacacatcatacatggaattagtgttcaatgcaacacaaagatctgtacaaatggatgcacttagcatcataatagaaaaggatgaagacattgatattgaacttgacaaaactatcactcatatcatcgctcaattgtactctgcattacacagtgtggacgacccaaaagccgttaagcttaatcacagtaaaatctccgttgtatcaactcagctgatcatcgacaacataacccgactcaaagcgctggacatcgttaaagtcaattatgatgattgcacaagtgaggtggcttttgccacgaaactgggaagcaccgttgtcatacccaatgttaaagcgggcgtcgtctcctacagtacttacaagatgtcgtttgggtccttgataagatcattatgtgcactattaggcgcctacaaaaacttagggaactttaaaagttgtaaagtggcaaagtgtgtgaacggtataggtggcagtggtaaaaccacattaatcagcaagtacgctgataaagccaaatgggcgctcgtgtgcaaaaccaggaaacctttagaaccattcatcaactgtgggttcaattatgttggcacactagaacaagccaacatcgacagattgagatctaactacttaattattgaggaagcttccatgatgactcgggttgacttgttgaccctatgtaatgtcccacatatggttgtggaatgttacggtgataaagatcaaatcagcatcattgatacaagtgacactattggttataggcataggaaatcattgttagacttgtaccaaactgacaacttgactcacagtttccggtatggcaacccattggcatcagaagtgttacgcatcgtttaccccgacttgactagtgaagaaggaaaagtaactaactacactaaattgcaaagtaacgagttggacgaagtcagagtgttcgcaattgagtacatgatagacgctgtgtactgtttctatgatacccactaccaagccatcaccagtcttctggctgatctagaagtgaatgtgtacaaaattcatgctgaccagggcacccaggcaaaaaacgcactagtcatatattggggcaaagacacgaatgtaggttccatcctaactgacaggaaatatgtcaccactgcattcaccagggctacagacaacttgtacgtcctcatgcacccagacaacacggccagtataattgatgtggtaacggcgaccctcagtggagctggaagtaattacacagaagaattcatcgacatggaaaactttcgtctcaaacgagagcttagcacttttgaagttatgattctcaatgagttcatgaaaaagaaccattctggtgtagtcgtcagtgtgtctcgtaactgcatcaacatctccaccaaaatcatactaacaaatttgtcatatgacatcactctggacggattagtgtgcaacaacctggcatctagggcactgattaaccaatttaaggctcggttcacagaagtgatgtccaaacaaacggacactacacaaaaatacagacagattgaagtaacattggccgacacaagtctattgtctcgattcaaacggcgtgcctggtttatgtcaacatattactccgctaaggatatagaagagttggctaaggcaaaggtaactgtatctatgccaatgcaacacaactcgaactatgcattgtccatgaaagcctggggcagacacatcctgctggctgactacgtgttaagtgcatcaccgacacatacaccaatacaagtgaacaccgaatttgggaattgtgacgtgaaaatttttgacggttgcagcctgtattgtggtagcatttggcaattcgataaaactcacatcgtgtatgtcagtagcgctcactctaacagtgagggcatcctcacacatttaactgcaaacgttcgcaattttaatggtccaaaaaaccatgtcaaactagttcaaaggttgttggacgacccggctagtgtgttgttcccaccactagaaacaaatttcgtagtaagcagaatagttgagcgcattagtaacatgttgacaactgcgaccacctgtgacaacccgtcattgacagcaggcactgcattcaaagctaccaaccaggccctaatagacgaagtgtctaatgagggctgcccagcagtgttccactggaccccaactcaccaacgcattaagatggttgtttgtatggatgaggatggtcacacagtggcatacccaggtaaaaggaggataagtgacacagcacacggcttacgaatggtgttgggagttgcaggcatggaagaagtggaactgaatagcttaaatcggaataaattagacaaaatgttggtccggaaaatcaaagcagaattcagtgaagtcaagtcaataacaatacctacatcagtcaaagaggatttctccaacttcatcaatgacaacctcaacgtcgtgaatgttaacagtattgaccgaccagctgacgacgacactattggaaccattgtcaacgcagttggaatggtacttttggacaaattgttccgagtgccattcgccgacatcaaaggtgtagacgcaacaactatcatgctgcaaaatatagaaggttacaccattgacgggaagacattagaccctaaaagtaaaagattgttggaaaatttcacactcgggaaattggaagccttaggtgaccggctcaagaaagagactaacccagacagcaaattacacatcacccaaaggatagaaacattaactcaacatggtcacttacgaaataccaaaagtgcaccggttttgttcataggtttgactagtgaccacaaccaaattgaatcataccgagaggtttatttcatgcactgcactggacccggtgcaggcgtgactaccatcgacaatgttcactacttgtctggcagcaatggtcgatatgtgtcaactaccccaccagacaggtcggcaacgctatacaactttggaaattatgcactatgtaaatacacaagcgcaaaaccccatgtccatcatgtgaagtcatacctcacaaccaacaagatacatcggttcaggtacccagatcgggagttggccgatgttcatatcccaaacaacatatataaaagactgctagctcgtagcctggcaagtgactgtgactttgaagacttgttggcctatgcacgctcattgtgttcaacaatgatatacactgcccgaggggcctctatgcaatacaaaatggaccaatttgatgtacaacaatattgtatagtggtgatcaatatagcaatgcgaaacaagaagtacttaaagagcattgagcaattcacaaaagccaatgtgatatcagaggacagtgaattcaacaaggttttcaacaccatcaagtctgtagttgtaaaagagctaattaactacgtgacgacaagtaacacatttgaaatgtttaacgaagccctcacataccagaaaaaccacttgccttcatggttcaacagtttcatagacgtcatcaaagacgttcaaatcatcaaggaccaaccggtggatcactatgtgttttatagtgcaccaaccccgtttacaccacattcaactggcacacctgaccacccagatgatgatgattatgacacgtgtgaagatgaattcgatcccaatgataatggagatgaacggggctactatcactatcccgaaggacaatccaatgggggccaatctgatggtgatgaagccatccaacccccaacagtggaccaaaaagacccaccacgtaaaacacaatacacccgagaggaacttgaaaaattcaccatagagaacattgtcacccagcttgaaaagaatcccttcccaactgacgaagaactagaaatcctgttccaagaacctaaaccagtggataaaggaaagaaaccaatgtattcaccaccagaggtgaatcttaacctacctgaagaactacctgagtcgtccaataagcaatccacccggcctgaagtaccgacacacatagtaaccatcaaggatgatagagtcgttaggaaaaccaacccccataaggtgccggtctcacttcctcccaacaaacccaccattttgctagtgtatgccggcagcaatggcgaccacctgccaatgcatggcatactttccatggttaaagatcacatggaagtgaccatcatggcgccagctgatgtggccatccctaactacaacttgcaagtgtgcacttatgtggagacgtattccaccttgacaaatgctcacaccaacaatcgtacccctgattggtccaccatcgctgaacacaccaccaaagctctgaggtgcgtgaactgtttcaaacccaatcaatttgactacgtggtaggcctcttctttagcgctgaagcccatttagtccatggcagacacatggacgtggctgtcataccacaatttggaccaattatggaacttgacgagttcatccgcatcggagcgttcaaacaaggcttgctcaacctggtcactggtgactctgcggtacaagtggaacgggtgtggagtgtgccatctttcattgttgatcataacaacattggatttcccatgcaagaggacgagtttgaaatggatgctaacaccaaccgtgtgattgagttctgttatagattaaatgcccaatgtacattggtcacctttggttccatggtgcctgacaactacgccacacgaatacagtccatctgtgctggggttgccgggcccttgctagtaataacgggtggtgcgtcaaaagtaaacatcccattaaaactaaggggtattgaatgcaacacccggttgtcaacccagtcgcaagacatgttgatcatccctagtgcaaagcacaaattgttgaagaatttcctgttccatgcccacattcatggtggagctggaaccctaataacattcatgatgttgcacgtgccgatcacaatatacccaatagcgtttgaccaaggacgtaatgctgaatggtacaacagcataggtcggtacatttcaattgacggtgacagcatcacgaaggagctcaactatttcagggaacaatgtagtgcattatttaacgttcctcaggggaggaagattaatgtgtcttttccattattgcactgtgtgtcccccctcatagatgacgacaccaccattgctccctggaatttaagacgtgtcaaagtgcacaagttccatcgcgttgagatcccacaaccatcagattgtgtactgcattccatgctatattgcattaatgatgaagccaccaaaatagtcgtacgaaaagcatatgaagacacggcttcagtctgtacgatttgctcaattggtgacataatagcactgtgtatgattgccaaattgcaatgtctgatctcggctatcaatggtgacacgtactatctcaccaacccaaacatagctgattgcgttagtctgttggtcaacgctgatgccacacattgtgatgcattgtcaaatgtggaatttgatgaagagtcacatgacatgactggtaactacaactggcaaaattgttggtacgtactcaatgaccccactgctgtgtgcaccttagaagaactgacagaatcagtggtgatgggcaaagttggaaccctctcacattactttaagcaatcatttgacgcacgaaaactgttgttaaccgccatgcggaaagccaatgtgatcagcacctacaacactaaagcagtgaatggcgggtggattctgtccgacatcaacatcccaatagcctcttggtactgtttgactgaatccggcatcattcgtgcaattagcttgaagaatcaactgaccaacgaacacaccatttatcatggacgacagtacgcagtgcaatgtcggaacttcatcagggttaacacgatagctgaggtgaacgtcaaccaattctttaggaaccacttgatcacaggtgatgtgtgcgcaattaacgcgatgacaaaaaaatactgcctgtcaaacgggatacacgtggtgggcacatcgattatggacagcgatgttctgtacatttactcaacctggaaccgcccacatcatcatgagaaagagcgggaagtaataatgaccgcaaaagaaatccgagtagtccccaaacagtggggcccaataagtttacaacatcttaagcgtgaaggcaaagtccgttgtatcgcactacgtggtatcaaacggtggtgtgttgaattggccaaccacacggaccccttgcaccctttctttgggaactgggaccaattggtgaccaaatattcgggcaacacttacgtattcaacttgaagtctgactcccaactttttaacctggagaaagctctattgaaagtcgatgatgcgacttgtagttacgctaatgtcacagctagaggtgtgctggaaaatgccaccattcctgaactgatccggcatttcaacataactgatgaagcctggttgactaaaaaattgcaggcttggtgtactcgtcacaagaaagactataatacgatcaaattgcgtattgtgccaattgcttgcagtgtggaaactctgtttgacgtctaccaaaagactgtgtggactattaatgacaacctaatttttgcagaaaacctaacttgctacacattcgaggtcacgggaactgggtggaccgaaagtgattggggttcagagttgttcaaattcaaatctgaggacaaattcggtgtactgcaacaacccggcaatactggaaaatcaaagaggttcagccaagtgggtataccccgagaaactatggcattaactcaattttcaactggtgaccacaggacacctttagaattgcaagcctgcactttactgaatgaacacacggctgacgctgatttcctcacaatctatgatgcaaatggtgtgcctggtgatatagaaaccatcagggcagatgacatccctgatgcgaaatcgatggattattgggacaacgaggggatgctcgacaacacgatacatatgccaacttccaaattttccataaaaagtagagtgcaacctgttggaattggctcgtccacaaaagtaaggatggaggagtacccagtgtgcgccagaccatcattgaccaaagcattcgctgaagagttgaacagcgtgacgttgaggcaaggtcaacatcaagacatcacaaaaaaacccatagtcccaaaaattgaattcgctctattcaaagacaactattacaagccagatcatgaggcgttaagtagactgtacagaagtgatgtggttggaatcacttatgaggggattagagattgggtgaaacagcacaattacccggatttcgtacttaaagacatcgagaaaatgattgaagagtcttgggaactcaaccgtattaacacagtgttagtgcacggtaaaacagaacaaaccaccaaattaaacaaattgtcaagatggtatgacgaagtgaacacacgtagcattatggctggttcgtatgccattgcggccatattcagtgggttcttcaccgaactgaagaaaaggtttaaagacgctttgaatgagaaggtgttttatgccgacgggtgcacaccacaacaactcaaccgcaaggtggaaagtgttggtcactttaaatatgtggtggaagatgacttagaaaaacaagatgcgcagactttgcatggtgtcatagaaattgaaaaactaatatatgaggaccttggtggtgacccagatgtgattcagttttatttgtattgtcaccataactggcactggagaggtcatggttctagtgggttgatggatgcaatgcgcttgaccggacaatgtaccactgcaatcggtaacgcaataactaacttgattgtccatggacggttttacgcccggaatgagcgcctgattaagttgatgatgattcttggagacgacaatgctattctatctgaccacgagttaaacgttcaacaccacggaacagaatgcaaagaattgttcaacatagtcagcaaggttggacaacgcgagaaggtgggagggttcctgtctatgctcgtccactgcatagatggcaaagccagtgtttgccctcacttccgaagactgaggcataggttctcagtttgcaatcacacttacagtgctgatgaaatgtcagacaagctggacagtcgcaccttgtcttacgcagtcatgctcggaaatattaaacaatccaaaaccatagcacatcaaataaatcaagggattaatataccggactggtatgacatctactcagccattcaagccaatgcactatatgacagttctaatgaagcgacagtggaaaatcacattgccaaactattacaaatgatggaaactagacaacctttcataaaggaattcaagcattgggtggaaaaagatacacagatcttaaaaccaagaattaaaaattaa

SEQ ID NO: 1226 - DNA, 14934 bp, Lagenaria siceraria endornavirus-Hubei
  source 1..14934: mol_type = other DNA
atgcaaatgaatacagatgcaattactccttataaaagaaaatataaagacaaacctcttagacttttaaataaagaattttcaaatcatctgcaagggtggatcaagttgccgagaaatcaatcggtgactattaataagaacccgtggatcaaaagctttcaaaaattatttaaggataaacgtgaacacatatttgataacaacaagttgaaattagttcctgcgattagaggtgaaagaaaaatacgagataccgtaggtactgtggccacaaatgttacttatgatgatggtttaggaaatgttataaatttcaatgaattgcacccgatggatgtggttaaaattttatacaatgtcaattgtctcgggattgaattatggaaatcagattactacacaattcaagactatatagacaaagtgaaacacttagagctggatgacgatgagaaggatgaagaagattttctagatgaagatgatttagatgataaactaataattaaaatggtgaaacctggaaggggaaattgcaccagtgaaattttgctagctttggataaaattctcaagcgatttggtggatttgaaggttattataattactttcttgaaaatcatttcaaacactttgggtacttggaatgtgttgatggatcgtacgatttccacagtgtcaaattcaatccattaaaggtatgcggtgtgtgcggtcgagtgaatcattataaccaattcaaccgaggattgcgccaggtacattattcattatctcattataaacaaaaatcaaaagccatcaaagaagactttctcacagagtttgatgaacaccacaagcccacaaacataccgtggagatgtggttattgcttttccgatttgaattacgtggtactgattgagaagtacatgatggtcaaattgattgaatatgtatgcaatcatttgtttgtgttacaaggagatattgaacagttaatgaaaatcggttatggtgacatatacgaggatttagatatcaaagataaagaagcaattaaaagccacgatgaaattgtggtgaataactatttctatcacagccaaagaaaaatagtcacagtcggacaagattttgatgcagcaagtcatcgtgtgatcaacgatgtactcggtggctgttactttagacccactagcaaactaaacagcattaaacctgaattcatagcagaattgtcaacattctcggaaataattgagagaactctcgtcggacgagacatcgtgtgcttgggtaatgtgcttcctggcacaaatagaacaaatgtacacaattggtaccacaatcaaacatggttttcaaaggacccagaggtgatgtgtagctcaaaggggatatgtggccataataaaaattactttgtgtatggaaatgttggtatgatgggacaaccacttaataacattttaaatatagtggaaggacaacgagcattacagtttataacaccaattatgactgccacaaggacgctaccagatagtacgggcatgttccaaagaacagaagacaacttgaacttttatctggatggaaatcccgtgccaattaacttcatgacggacacatataatgcactaaataattatcaaattatcaaatgggacagaaaattgttctacgttgttgaagtaaagaaactgaacctgacaagattaatgacgatagttggaccatttaatgacaccatagattacccaaggctaatggttgataatgagcggggaatcaaaattcgtatcagattacccgacatagacagcttcatgggtaaaaccaaagggttaaactatcaaccaaaaacatttgaattaaatgtgaatttattcagatatttgtgcatgcggaatctcaatagaaaagtgtcccacgaaaccctcagaccctatgcagtagggttttcaatgaggcgatttgtagtccacaataaagtaatatcaaaccccactatagcctatgaagacttagacatgcatattatactgagtagagtgtgcatgatgaagcttaagaattgtttcgagataagccacaattatagtaaagcgttgaaattactaggaccatttagaagcatggtcggtgatatggaaagtgctttgaccgcatccatgataggactaataggagaaatattggagaacacattagggttaaaatgggacgctgtattaagtatgttggatggagctagactacaatcaatgctaatgggcgttggaaaagaagatttctgggagcacctgttgcaattaaccgagaacatcacaacagtacctcccaaaatcttggacatggagcggcacacagaagaggaaatcacgtttgcactgcagaattgcatgcatcattccatagaatgtaaccatgttagagtcaaagcagacaacaggtgttgttgttgtaatttgccaataacagacgagttattctgcaatgttgtaaacccaaacccagtcagtaacgagccatatttcacaccaaatgtctatgaagtggagccggagagagaagaacaacaaataggtaatattgaaaaagataaaatagtggacaatttggccaacaggataatgttggctatgagagacacatctataagagaccgacgggtgcaaccaaaggggccgtataaattaccactagaacaaccaccagttacaaagataactccagataacgcaagaataacagaaaaagcaaatgttgaagaatctaaaccaactgtagacattaaggtgaccaaatctaaaacaagtagtttcaagtctaaaaccagcagcattggagaaccaccccaaaatgcagagggttggcaaaaagtgttaagacgaggaaaggagaaacccactgatatagctaacgctatattagacaacataatggagaatgctgaaagactcacaatctcaacagacaatgtggaagcaattaatatgctaggatatgatttcgtgcgtcattgttgtgaaacagtgcagtacgagaatgatttaaataatggtgtgaatgagatttattatttaccacatttgccaacaggatcattgatattaccacgagatagttttgagatcattgataaagtttacataccaaattcagggccattaacatgcgcgtttgatgcttatcattttagtactgaaccaggaagcctacaagaaatgattgacatcgtaggggctcaaccaccttttagcacggaacatttgagtttgtatgccaagtggaggaaagataacatcatgattttggatgacaaccatgtgcatgttgaaaaacacaatgaaagtagcaacacatttgctgtgattcaatttgagcatggagaaacaaatgcggatataggtcactttttaccagtgaccatcaagcgtgtgaaaccaactccaatctacttctatcacagagatcccaatgccatagtagagagagatcacatagtcaaaaaccggtacgggaaaatgtatagttctacatgcttaccgacttggagtccaaaagacaatttaagttgtgagataacctatcacaatataacagtagatgttagagtgagtgaggcaataaaaccattaaaattagagaaaattgagaatgaatggtatttgactaataacctagagaccagacttcatttaattgacaaggagaaaatccatgctaagttaccaaaaatatttgaaaaatacataagtaaaatagagtatggacttgcgcttaaattacccagcaatgaaattgaagaatatcgtcatattgacaaagaactcccagtaaattatgagactgaattagaagcagaactactcgagattctaagagtattcgcaaggttgagtgaactagctggtcaagtgccatttagagatattaaacaaacacaccaaggacatattagtagctggtttgggaaatccaaattcagcatccctggtggcaaaacacataagatgaagaaaatggacgttgtcatgctgaagatccaaggaaaatggattaaatccacaattgtggggtttgatagaaataatcctgttttagattatgtagctgtgtgtgagcaaagggcatcactggtagagttaaaagaatctatgggtagtcaaatcagagagttagttggtttatgccaatcttatgtagacctgaaaacacttaaatcaaaactagcagaggctaaatttctcacgggacctgccgggttcggaaaatcaaccaaaataggccaatcagccgtacctggtgatttgtgcgtggctatgaccacatcagcagttaaggcattgcaagagaaagtcactagaggagtaaaagtcatgactctggaaagagcattgtattcacacgctaaaacgggtcagacgctattcgttgatgaagcaacaatggtcaattggttatttttggggcacttgatcactgaccaaagcagaattgaattatttggagctgaaaatcaaatcgggaaaagagatatgagcaaaacaccaggtattcgctacaatataacattgtctgatttcgttaaaccagaaaataaaataacagaacatcatacttatagaattggggagccattggttaccctattaagatcagtagaaccaaaattgatgacgaaagcatcacacaaaaccacttacaccataacagtactcgatccagctatggttgaaaacatcaataacattgttaaggatagaaaaccagaggtgattatcaccccttattcttacaaccgtaatttaatagaacaatttttaaaacatgaaagagtgccagttgtcacaactcatgcataccaaggggttgaggtttcaagatcaatggtggtgcttaaagcagatgctggtaatagatgggatttaaatggacatccagaatacctaaattctgcattgacaagagcaaagtaccatgtggacattataatatacggcaattatactgatgtcaagtccttagaggacatcatgactcaggtgggtggaatggattatgaatatttacaatatttcaatgaaaacatagaaagcgctacaacagagattgcagaggttaaccaatctaatgaaacaaacaaaggcgacaaattgactctgaaaacaggaaccgcactgcctgacgttattactataaacaccatgcatgaactgagtgaggaaatggtcaaccaactcaatgagttgaacatttcaatgcaaggtgctaaactaacgtaccaaaaattgcatgagggtactagtgtgacaacccaatttgctggtgcaacagtgagcaaagtaactaatattaatggcattgtgaatgtagatgcaaacccgataataaaatccaaaattatgcaaaatttggacacaccaatagatgttcctgagttgatcaaggagcaagtcgatgggaagagtcaatctatagagtgtaaaatgacattgcgacaaactaataaaatcagagaattaacttggattttggataaaaccatagatcgtgaactcaaatgcacaatcaatggcgttaacataaaaatgactaaaacagcaagctgtcctttattcgcgggtgtaacgtttgaaacagacacagaaaaattaaccgtatcaaatggctggtaccatgtcacaaacagaaaagtaacaataaacaaggagaggttctatccgggattgacaccgatcataagatggttacaactagacataaaagaattaatattggacagtaacactaacatagggtggttgcaggtactcaagggtgacatggcacattttctatggcagctgaaagaaagagcaacacaagtacacttgtggttgttgaacttcttgacagaaacggacagcccaaagtgttattacaacaatataatcaacacagcaaaatacaataaagccgctcgatccattaatcaaccaatggtcaccaaccacccgtcagttgcggatcacttaaactacatcataaagaaacaaagttggatcaagaaacacgacacctacatactcactaatggtaaccaagtaataattgacattaccagcaatgaagaggaagcaaaatgggaaatttttgctgtagaatgtctagctgatatggtcaaaactggaacaggcatgcaaggaatagcagctgcagaactggacattcctggactgatgatccccttgcacaaacatttagcgctaggaacaacagtacaaactatcatcaacaataatctgttgaacctaaataaacaaacaagaccaggagtgtatgacgtcataagactagataaacaaaactatgcaatgcaaaagcattatttgaaacaccgttatcctaggatgactataacatcaggtaactatgagataataaattctggaattgaattagcactagagcaaatcttacttaacatgagaggaggattaactgagaatagtactggtattgtagcttattgtgggttatgtccgatatcaatctgtatgacaggtaaatactatattaagattgtgttaccagacgtaaactcaaatatcagattcatgtatgacatgcaaaaacctcaaatagattcaatgctggataactttaatgccaaaagggacgcaaagactgagttgtattgggatcacgaaactaagtgtgagaggatcttagcaggaaccagtatttactcactgaccttagaagaaatactatatctactggacaaagcacactgtatgtatgggtggataccaacctttgctagagacaccgacgagtatgtgtatgacagacaattgtattgctacgggtacagaggtggacgggtgactaacaaaataaggaacgacataattgataaagtaaataaaggtgaaccaatcctaatcaaatatgacaagaatgaatacttagaggcaaccgttgtgacagaagtcttcaaccacagattgattaaattacagttcaaaccgataccagtttgtaactatatagacagacgcttaggaacatatatggatataaataatattataaagattaagataccatggatagatttggacttatttagggtcctcaaagatagacaaatcatcaccattaaagaattgacaataaacaaacggttcttaagaaacattctcttacgtttaatgacaggtgatgacacgccacacggggcattggagtacgccaaaactttagaatccacccaggtaattacagaaaaaggaatagatgatttaacagccagcaatctgttagtcacactcaataccacatggtatgccatttatattcataacaattatctagagaaattcaagactctaatacattacttaaattatacagatggtaggccagttgcagttttaatgctagaacaaatactgactggtataggcaatttaatgggaatggtgtcagataaagtctcagacatagcagagcaatttataacgtacttaaacaagaattacaatttgacaaacaaaatggcagattgtataagagaggcggaaaagaccaattggactccagaaaccaaacaggtttactttaacagattttacttctcaaaagatgatgaattcacgttacgatcttggatgacaggggatgatgacaataatgatgacgatgacgatgctggaaaagacgacgacaacgtgacggaagataacaacgatattataaccaccgattctacatcacttccaaacattggatacgaagggccaggaacgtccgctaacgccgaggatgtaggcacaagtacaacagaacttcaagaatcaagcactagcacaaccacaaacgatagcgatgatagaattagaaaactgatgatacaacctggaaaaccatataaaaacacaagattaccaatacaagtcatgcggtttgtcgatgaaaaaggagcaaccattattagtaggaaacaaacgattggtgttttaaagactttgcaattgtacggtgatttcaatgaagagcagttaatcaaagctgccaaattaattgacgaagactacatggtgcatagggacttgttgcatgcaccctggaaccttaaaacactatcagctaaggttgaagacgctttaggggtttcactggaaaggaaatacaatgaagaggaaccgtcaaagtataatattcaattgtactctgcatcatctggaagggatatcaatataagttatagtgaacatttcatgatacccaaaataatttggttttactggcatgagacaagtgtaccagaacttataatgagatgcatcaattcttgggcaacatttaatgatagctatatgattgtagtgctgacaaaacaggaattatcccaattaataccaaaagagataacagattatgtggagaatacgacaccccaattcgcgtcagactgggtaagaacgtttgttttatctagatttggaggggtttgggccgatgcgagcattatatgtacagggacaattgacaggttggtagaaagaactttgcaaaatacgattggattattacagataagtctcgggagcaaacaagtgaaaatcaaaacgagtgaaaattggtttatcatctcaagcacatacaacccaattattactatgtggaataacattttgactgacctgatgaaagaaacaaaaccaagtggagaagggtgtagtgtatggattaaaaagaaataccccagtgaatactctaaaataaccaaaacaatggctgccgatagcgtggactatctaagatcctatgttctagagtcgattgttagccaaatcactgggttattcccagaaacaatatgtaaagatgaagggcaactaacaacctttgatgatttaccacattcgaattgggacaccctactagaccaatacacgacgaaaactaaaagaccagatttaataatacctctagtaaaaatgatagatagtcacagaataatcataactgacgcccttctagatggaattaaaccggaaacaggaagtttactacatgagatctatggtatggacttcaatttgaaattgcacaccctacaacaggtacaagaaagactaagtagagcaataaaggagaattttgaaccagttaaaaaagaatttgagctaactagaggtctccagatttttaaaacagaattctcgtatggcatggcaaaattaaccagcatgttaaataattcaatgactgttcaggaaattcaaatggtcaggccagcactggaattcttggtcaagagtggttgtcatttatacatcacagaggaagagttagtgattatgttaggcatggtactcgggaaaatgaaacacatgaaagatctacgagaagagactcagatttgggtggttttagaacacatcacggatactaaacaaattgatttagagaagtggtttgaaacaaatgaattaacaacaatgagattgaacgtgagcaatagactaccaaccaagcctgattacgtgacacacgggaacagaagaataccaaagatagtatggtcatattgggataaaactgaggttgcagaattccaggtaaaaatgatcaataactggtattatcacaatcaggattatcgaataattattctaaacgaagatactttgttgaaaatggtgggcaaaaacacacacgcattgttaatgcgacaaacaccacaattcagatctgattgggttaggttattcatcttaagcaattttggtggagtatgggttgattttagtgggttattcacaaaatctatacataacttagttgaggcgacggttaagaacagtgctggttattgtcagatttcacttaacaaaaggactgacaagaaaattgtcctggaaagctggctcatcatttgtgttgagaattgtaaaacaattcaaagctggtttgatgaaacgaaggaaatgacaaagttcgtagatccatcaggttacaatgcattagaatggatgaccagcacatatggttcagagtatcaactagccaaagagtacatcttgccaaatttaaggacttatcttagggtgtacattatccaagtgattgttagactaagggttaaagacgatccagttatcatttacagtgacgaagctaatgtgtccatgttccataatttatcagctaatgcatggttgaatttatgggattatgtggctacaaaaccaaaagttgagattgatgttggtgtgcctttcataaagtggataggtattcaaagaagcatcataatagaaaattacaattgtcatcatcacaatataacgccaataagtctcctaggagaagagttgaattaccccagcatcacatacaacgtgatgtctaacgcagaattaactttaccaaatagagaaggatccacaacgaagaaaaccaacaatattataattaataaatataccaattgtaagactttgttaatatgtgtaggaagtgccggtgacgtgttgcaattcaaaacgatttatgagatagccgacagcgaagggcaatctccagtaatcataactcataaagaccattccaaatatttcgagaacaagaaagctcattattttgatgttgagtcagaagaactaatggccttagtgaacattgtgttgaatgaagttgacttatggatggacattaaagctagccacctagtgagacaaatttcagatgacattacagcaatagcaagaaattatgaacaaataatagagaaagtaattgtgaacagtgcagtgccaaacttgacagagctcggtaaaatgttaccatgcgactggttggaagtttcgacgtttacagataatgtggtattcaatccaaagaaaaccaccggacttaaaggttctattttaagagccaaggaatggttacatcacaatatcattaaaagcgaacttaaggaggaaaatgtcaggtcactgcgtaaattttgttcagggtatcccttattttacccatatgtaatgtcagtgtgtggaccactaacaatttggagtatgcccagtaatcacaatgaaatgataatgagcgaacaagacgtactaattacttttggaagttgtgataacacaataaccacaaagagcaaaatcaaattaatcgaaaatttcatagactgtggttatagagttacatatcacgataaatatcaaatagcagtaccagggtcagtgttattcaacgctatggaacaatacccggggaagtttggaatcgtgaataattacgacttacgaagcgtcaaaggaggaaagtttgtcttggtaacacacggagggcacggaactataatggaagcattgttaacgaattgtaagataatgatccaccccataatagcggatcaatttagcatttgtgacacaatggtgcaacaaaggatggcagtgaaactgactgacataaccaacgtcaacgattgtagacaagctatagcaggtttgaataggttgattgacacaacattggcagtgaaaccagtcatatcagtgttcttcaaaccgttgatattttggttgaaaccagaatacaaaattgatagtccagatgaaaccttaaaaatacttgatgacgccgaagttatgggtgactatgataacgtcgggagcggaatatataggatcttagatgtagaacatcaaatactgtatgaccctcaagtgccaaatagatgcgttacccatagcttagaatatatgttacaaggatcaggacaagaaaaatatttaacttgcaatacaatcgctgtgatgaggttacaacagcactcagtaacggagcaagagttaattgacggagttttaagcatgggagttaatgtgattttggtgtacagcaacgggactggtttggtagttaaaacaatgaacgggccgacaatgtgcttttatgttgatagaagtagaactccatggcatgtgtgcgcagctaggttggtaaaacatggggaagtcatagacttaatgaagagaaatgccttcattagagaactgccacacagtattgactatgagatcaatgagttgcacaagaatttctcaactgcgatgttatgtatacccaagttaatggctcaacaattcgggaaatcgtttttcaaaaatttcttagctcgtactaaatcaacgaatctacaggtgctttcatctagaacagatttacatgtggcttacataactattaaacagcattttgacgcatggattggggacaccatttacccagacacaccattaggagtgggatgggttattaccgcacaaggatgggtgctagcaaactatttcattaaagatggcataatagttgtattctcagacgacggaatactcgagcaaacaatcttgatcaatctgcatctacagtaccctgtagaaagatcaaaatcagtgatattgtcaaccaaacaagaattggttagtttgaacaaaccaactatcatgtacactacattaaatcattgtgtgccaaggtcaagcaacttagtttccaatttccacaaacaaaatattttgatagtggctgattttgataacagaaaacatcatatgtttgatgaaatggacatgattaaaagagcagcaaaagtgatttttcatacgaataagcaaattaaggtggaagatctagctagcagtcataatgcgccattaaataggatggtaatcaaacaaggaaaagtgttgtatgagcatgagttcgaagagaaaatgaggcaaagacaagtagttaagttgttcggacttaatgtaatgagtgaacaacaatgcattacggcctcacccttgacagaagaacaaatcaattacatatacaaatattttgtcaagagtggtaataaactcgtggcaattgataatgaaagttacaatgacaaagaaattaaaccaagcgattgggttataactctaatccaaaatagcgaagtaatgtcaaatgatgtaattaataacttaatcaaattagtcaaagaacattcaatgtggcacatttatgatcaacacaattatgaattaagtatgacacaagctggggatgtggtaacactagaacatggagatttatgggttaaatcttatggaatcgttttggtgtatgttcgagttggtggtcaaagagagagattaagttggaagctagacacagacagtgcccaaataaacaatccaaaaccaggagactggtggggcttagaaaccaagacacaaactaaagtgaacagcaatttcaagaatgtgttggcaataaatgagttgaaataccatgaaccagaaacattgttagtagacgggtccaatgtagtagagagtgatgatttattagatatgtacatcccaccataccattatgggtacacaggcagtgtcatcgaaccattgttagatttcccagataatatagcaatgcagttatgggaagatacagatcaaaccgattggctgtcattatatgcacccagcaaccaatgtcagctcaaatcaagagaattaccagggaagataatccaaacagagaagataactttaacaaaatggccaatacgcagcagagcagtgttaacaaaagtctgttttgaagaaggaaggagtattttgggtagaatgaaatcagttgcatttatacggactgtgacaccagacccttacaaattagtaatggatatggcagacacttacttcatcaaaggttgggttaccaaagtaaatgagtttagagctaaaaggttggtgattttaccagaagacgtaaagcgttgggtggaaactaacaaggatgcaaagagaatagagcctgagttattggaattgttgagtggtgaaatattagtaaaaccgatgaatgacgtaaatattcatcttaaactagagagtctgttaaaagacaacacgacaattatgacgaaacaacaacaggctaggatcattgtttggcaacgaaaagctgtatgcgcaatatattccaatttatttgtgaaggtgaaagataggttaaaatctattttgcatgacaaaataatttacgcagatggattgagaccagatgaaatttcagctagagtaagattatgcaaagacatagctggtttctttgaaaatgacttgacaaaacaagatagacaaaccgacgcaccgattataaccactgaaatgtacatgtacgacttgttaggagttcaccctaatgtgatagcctcctggagagagatgcatgaggtttggagatttaaatcaaaccattactggggacaaggtcaaggtatgaggctaactggacaagcaactacagctattggtaattgcataaccaatttgcaagtgcatcaggaattcgtcaagaaaaatttctcaatcttagagttagctttgtttttaggagatgatatgtgtatggtttttagagaaaaaccggacacaaaaaatctaaggaaaaatatagcaactaagttcaacatgcaaagcaaagatgcatggtatcgaaatggagcaacattttgcagcatggtcatgagtcgcacaccaacaggcgctgagctatgtccagatgtggttagacttaaatttagatacgaagtgaccaatggagtgcatgaggcaaatgctgagaacattcttatgcgaaaagcgtcttacatcatgatgttaggtgaaggcccaaatgtgaaggagacggtcacaaaattgaacttgccgattaaaccattagtctggtatgactttgaatccatgttaagggcggttggagacaaatatgacatgtctcatgtgcaggtgttagatgtgtattataacttactacaaatgctaaattccgagaagttgtataggcacacatttagacatttttccaacatagaaggaaagtaa

SEQ ID NO: 1227 - DNA, 16092 bp, Lonicera maackii endornavirus
  source 1..16092: mol_type = other DNA
atgtcaaacgatccagcaaaagttacaagcacatcacacacaaaattaacggaaccttcccccaccgaggttccgttattaaaagaaaagaagtggtctaggccatcagttgatttaggaatcgacttggataaaccaattaaaagagaccttatgacgacaggtgccatagactgcttcctaacaggtgggataacaacgaaaccagttgttaaatcaggcaagagcaatcttgacagatttaatgaaatgagtagtacactcttcagatctggaatgcacaccagtaaaaacttctccaaaactgcagagtttgggggaggtttatttggacaaaaaaaaagtttgaatgcaacaatacacagagttgacctaaaattttgtcacacccagcgcagagtgttagaagacataactaaaactaaaccacaacaaccaagaggttttaacctagcaaagctgaaagacaaattttgttgtaatgctagtgctgatagtaacggaaaattgattttagtgtgtggcgattgtgagaagtgcaaaattaacaacaatatgggaaacaaagaaaggttgccaagaggtcgttttagagttcggccgctaactaaatacaatggaactgaaaccacagagaaaccacaagagaaacgaagtcaagcggtgaaggagagatttgtgaaatattgcaggccaatatacaagttattgaagaaaaatgaggaaacacctgtcacattctcaaatgacagactccttgcaacaggaatatatgggactactaatgccacagttaacaaggaaagtgacatgttaggtcgtgatatgggactttgtattgatatttgcaaaccaggtcttggaatgataaattatgttaaatatggttacaagaataaactattgacgcattatatcacttcaaaggattatgaacagtacaaaaaatggctcaaggaaggcatgaaagacaaaacactaaaaattacagcagagtctctcaaacggtgcacgcatttataccccaaggacgacaatagacatattggcgggaatttattgtacaaagccataatgttgctgattcaaacaatcaaaccacaaaacctgaaaagattggttaccagtgaaaccggactaaccatgaaacgggttggaaagaagaccgtaatgaaattacctaaaatggagcatagaattacagatggttatgacgggaaggaatttggaactgcaatgcagggtcatctaatgactagagaaacagttaaggcgatcgatggcccgatgttggacagagtgtatgggcacaaatgtaaatactgtaaaggagtgaccataataaccaatggtcatacaggaacgaattataatatggctgccacagttacacgtggtagaattttgaatgccattaagtatgctgtcagcagtgacaagccattggcagaattgtatttagcaacttcgatagtgagagactattccaaacatggattaaacaggataaatgataatcacatggagactcattgtggtttttgcggacatgatataatagaagacccaccgtccttaattgaaaacattgagaaattattcgtagttcatcatgtggatgtgaagatgggattactccaccaattggaaaggatgggttacttggatggatcgacgttagacgcaacaggggaaaagaacataattcaacaagacttgatcacactgaaacatcagttgtcgagaatgagacaggacgtggttttgctcccatcgagcatgtcatctgaagctttaacaacgttaaatagagtcttaatggaactagaaatgcgaaccgatgtggtaccaagaataaatgaaagttgtacactagggacgacaagggccctattatcattggcaagttcgatgaatgaatatcaaaatacgtatttatatggtgactgtgacttagtcatagagaacgctaagtgcagtaatttgtggcaattcagaccacaattgtactataataaagtaggtgaaacttacgagaaaatcaacaagaaaaatgagaacaacatattgttgttcgacctcaacatattgcgagttgaccctgccgaactagtcacaactttgattagtaacggagtagaaacaatgtattatatagtgccaaaaattactagtaaccatgtgagagatacgaaggtttgtgaaggcgagttacaagtaaggccaactgaagatgccatatacattattccaagttggtcggacaggccaataagatgtgatagagacgtcgctttaacctggatgcatgcagattatataatcacaaatgagaggtgttgctctatcaccacggaaagatttgcaaatggattgtgtttaaaaaaatttgaaatgcagttggcgcaattagactccatacctaaacaggttgccacagtagcagacacaatatcgctaacaatgccaacattgagagtttttgagtcaaaaggtaaattcaaattttcgatgtgtggagagagaaccgtcctgttgaacagagagttgtacagaagaatgatgattagaaacataagtggcacaaactcgtataaggagttggtggattatggtttgggagtagcgaatatgaaatacaacattaacgacactgtgatctcgtttagcgacataaatcataatatcatcaaacacacagcggcttttgtatattcaaaaatgatcacaaaaaataatgtaaacatccttacagaaaagttaatagcaaatattaacacaattgacgggttcgtagcttgttttgtaataaactccatggatgtgataataaacttagctaatttggacacaaatataatttccaacataaaacactggttaaaagagaaatcaactcagacgaagatcaagggtattgcatcacacattgacggattagacattgacaatttaatgtgttatgcgcgggagccagtaatcaaagagtatagaggcatcaaattgaagctcaattacaaacaagctcaatgtgagcatgatgtggaagacgaaacatcaataagaggaaagaaatgtgagtgttgcaacattaagaatgtgaagccagatgaaaaattttgtgtcgcgtgtgacgaacactctgatcacaagtgcgagcacaaatgcagaatgaaccacaaagttgaatcactcgtgatatgcagttgctgcaattgcaaaatgactggtagtgagtgcgagtgttgcaaagatgtaggacaattagaacaaattataacctcggtgccggattcggtggaggaaatagctgaggaaaaatacaaacgaactaataaacaccacatgttaaaaaaacaaaaaattaaatcaactccagacagcaagctcaaatctgctgtagctgaaccagatatgaaaatacaattaactgacgaactaatgtcgaaaatggtagataatattacaatagatgcggaattgaaacggatcagcatggctgaaaaggaaaaaaaaattgccaaccttaaagaaaaatatgagatagttggaactgaggatattgataaaaaaacaacaattggcgatttactagaggtggtatcaaaagatgatgaaagcatggagttatggataagattatgtgctaagacaaacgaattctacgcggatctatttctatatggtagtgaagaaggttgggctagaaatgcactaaaggcacagccaccaaacttggccacaatggaatcatacttaacatttataccaatgggagacacaataattagaaatgaaaatatcaaaattgagaaaacatacgaagcgtctggaagtggaaatttgtgtggattacatagtttgcaaatattgtatccggaaaagaattttagattagaggacttacaggcagtttgctcgaatacagcaaactttaccagtgatgatttgatgaaatttgcactagtaaataatttgaacctgatagttgtaaatgaaagcatttcaaatataacaaaatcaatcgaagacgacaaatttaaagctataatacacagtaaagccatgggaattaacatagaccactggcaaccaggagtaattacacaaactggactacatgtaggattgccatattatccaaaccatttcagttatgaagatagattgaaaaattgtaaaaagaatggtatggatagaagatcattgatgactaaagagttaggaaacataaacctactcaaattggaggtaaatcttttcgaaagtttggttgaaacgaatctaaacccggcagaaagaatgttcacgattacctcgggagcagatgaaatgacactctcaaacaacaagcaaaaaaaaatggagccaaataacggtttattcagtgtcaaagttaacaaagagaatattgacctttgcgaaaaaattgttaattgcttgatgagaccgtcagacttcataggagatgattggttttatgatcgatcagacgaagtgcctgctgacgccacagagggaatacgaaatttaattgaacaaaatattagggaattagctcaaattatggaagcgagtaaaaacgaatattataatccatcattggtttcaacacacacaacaatccaatatgagaagatgagagacaatttgtttaaaatttcaggatctgtgaatctaaagccgggagattgcattataggtacagtaaccggtataaaagaagaaaaatatgttgaatcaaaggtaattggttatgttctcaggcaaatgggagagtggagcatatgttcctgccaaaaatgcccaaagggaaccagaattaaggtgaaagtgctaaagaagaacactggtagtatatacaggtttttgttctcagctttaagatgggacttccgtcgtgatatgaaggaagtaattgccaaggcggtgggtgttgacgcagtggctggttggggtaaaaccacagaaataagaaatatcagcgataacaccacaactattgtggcacagacacgtgcggctgtcaacaacctaaaggaaaaaagcgtcaaagctcatagtattataagtgccgaaaaagcaatgattgaaaaggttaaaactaaacgactaataattgatgaagcttcaatgattacttgggaaacactttccataatgatgggtaaagaagtggatgaggtgatgttgtatggaaacactaagcaaatatgtgttgtggacatgttctctacacaaggattgaggagttcaaagagcatacttaatcagtgcaaaaacatcataacccattatgagtcgcgaaggatagggaatccactcgcagaagagttgagtctatttgacaaaagcttctcaacacaagctgaccattcgacagagttctccacaatcagctggacggatatgaagtgggatgaattgaataagattgtcgaaactgtggagacttgcagcatcctatgcttttataacaatgctgtaagactagttacaaacaaattgaggtataaatgcccagttagtaccatacacaaatttcaaggtttggaagatgacaacataattgtgttgcaatggtgtccgcaaggtaattacccagggcgaataacattggatgcaaatcggtgcttttctgctgccacaagagcaactaaaagattgatttggatatcagtaaacgaatacagtaaccaagtgccactgcacaatcgatttggatcttcaagtggtggaaatgaaggaaaaataagggagcaagtgaacataaatgattatatagtgagaattgcaagcagtatggtaagtaaggtaatactttacagtaaggataaaacggtggagagattaaacgagtgcctggaacattacaaactggaagggtcacgtaagttggtgaagcaaaccgtaacggataatgatatagattacctggaaataaaaccagaagacatgaaggaccagacaataacttcacctttcaagaaaagtttgagagctatgtttaagtccagcaagaaggtagacagcaagaagacaagacttaacaaattgctggagtattcgcaaggtcaaaacttgaacaagtacaaattggacgatggtattattaaaatgtaccaagccacaaaggagtcttgcgagaaagcagggaaagatttcaaaactaccttcttaccaataatggaagaaatgttcaaggtggacaacagtgtcgtcgacataaagtcaaactttgataatgagttagaagtactgacaattgaggcaagtgtactaaaaatcaagcaagtcacgatacgaatggattacaagaatggtgtaggcaaagttttcactggaaaaacgtctatagtagataagacagatgcgaggttctctaaattgttcgatccaatacataaatgtaaaagctaccacatattgaagaacaaaaacttaaagaaagacataagagtaaagaaaactcaacatttagaaaagatactatgggtggtgaaccattttggagtagctttagaaagcggcaatttgacgatggaggtgagaatcaatggtttaacatacattttagcaagctacggtggatgttcactgtgcggtggcatgattgtatactgtaatggaaaaatgattttggttatagaacctagttataataccggagatgaaagaaaaattttgtttgacaattggagcgactgggttttgagtccaatattaagccacttcaaattatatgacgtgatggacgcattagctttacaatatgaagagcctccttactttgtgaaatccgacatagacagcataataaaaggtaacgtgatgacagcattagtattcgagagaatggtgaaattgccatgggtaatcatctctaaattgaaaggcataattaaagggaaaaccggagatctgtgtgatttttatgacaatagttacaatgagagaatacaaaacatggtaaggaagttgagagctatgggattcaataacataaacacaggattgtgtgaaataagttacacaaatatacaaagcaggcctgtagtggctacatttgatggaacttactacacctgttttatggatcaagatggaaccataagcgtgtacactgaagaaacaacggcaaatactatgttgcctgaggtcattaagttgtcaaaatatgacatgaaaaagaaaatcattaagagtataatgactggagtggagttttggatgacaaattgcagagtagatgaagaagttgaaatgggcatgataaggaaatccggagcattattaagacccatgagtgagcacatgcaacaaaatacgatggttgcagcggccgcgaaaaagtttagaggacaggttgaggccaagataatgaagatgagagtcgggaaaatatattttacacagaaaatgatggccgactatgaattcctgtccagccacttgtcaaggtactacaatgtgtttgcaatagcaacactgtatccagaaaataatctacatggaatggttgaaatgctgttggcgcagagtttgtaccacagcggttatacggacactctttacatcacaagtaatgctagcaccactgtggtctgtggcttatggagttggttcgcaaaaccaagtgacaataagtatatagaaagcaaatttttgagttccaggcgatatgcaattggaaatttggcaaatataatccgcatatatcaatctgacattgaatctttggaaaaaagagagcaattaagtgatgaagagaagaaggagcttttagaaaagaaagcagaagttcaagcaattagagatcaaatcgaagggaataacgagcagtggtatggaacggacgctggtggaaaaacttttaaaaacgtagtggttagcatggaaaacagcaacataaaattgagtgaactaatcaaaatatccacagacaacaacataaaaacgataacgttattgctcccagccacgatggtagtgagtgaaaccagcttacacaaagttgaagtctttggcaacgatcaagtaatggtgagtttcaaagacagtcgagaagtgatccaacccaacaagcagatagtaaacatggtcaacaatggaagcgccattgatcattctgaccacatcataacgtcccacactaagtcaataatgtatggtattcaagttgttgatttgacaattgaaaaaaaagaaaagacattggggaatgatgcgagaatattcagccctttcagaaatggcttagaagttgagaaagtgtggatacagtacccaagtgtgaacatcaatttgatgaccggagacagcagtaagttaatcattacgaaacacaaaaaactcgtgagcaaaaaattggtgttaaaattatacgagagagctttgcgtgatgattgcaatctatctgatttgcaagcttatggcaggtcttacctgcaaacacaaatgtacactgagaagtatgtcaccacaattaacaaagatgggttagacgaactaaatgcagcgtgtatggtagcaatagcggaaaaaaatggcctaaacgaccagttggatgcaacaatgaaattgatagagaaatttaaggtgaacaatgatgactgcatacagaaaattctaatgaaaggcaatgccaaatctttgttggagttagtaaataaaaatatggctaaattgcaggattatgttggtattcctgacaactttagtgagctattgaaaaaattaaattcgaacatgagcgcaacttttatagatgaagagtctgggagaacacaaacctggggccacaacaaagaagtaactttaagtaacgtgttcaaagaatggtggaacaccaacactgaaaatctcgaatggataaacgtcgggtatgtggatgattatagacgcatagtaagacgttcaaagagaaggaagccgaagcagagtaagactggtggtacatctgattatattaaattgatgactggcagccaaacccaacggttgatgcgccagtctgattgggacgctagatcaaccgctttaccagagccaattgcaggaattggtgaaagcgacgtagagacaatgttgactaggggcagtatgatcgccaaaagttcaaaccaaccacacattagtggctacaagatggttaaggcaaaatccaaactaagttctattggtttcaaaacaattagaagctttataaacagagccgctgaggttttaggagtaatacaaaatttagatgcaaatgatgtaaaaacaatttttagtttagtgaaacaaagcttaatggaaggctcagtaaataatgcagaaggatggaagatagcagaggatttgagatctttgctggacttggatgcactcacaactgatgaagtggctgcaatcctaagttcaatggagaaaatgtctgacaaatttttgttgacggactcgagaaatgttggttggagtgcagttgattggattaaaagtagcgacaatataagtgatctaacggatgaacaaattggaatggtgctcaacctgaagaaaatagataagcttaacgatatcaagcaaaatatcgtgacagatgaggatggaaactatctaacaaaagaagatgccattaaattaagatgcaagttgagaaaccaatggtcacaaaccaataccggcacagttaattcaataggagtcaaattatctgtccacaacttattgaaagagctgaaccatagtgagataagtggtctggaaaataagaggagaaaggagagaatgtggctagatatggcctctgtgccaaataatcaaatactacgtgtgtcaacggaaaacatggcaataacatatgaacctgttgacaccagcacatgtgtgtgggattgcattgaacaatacttcaagaggaaggtggccgctagcttcaagttgaacgcgagcatcaaggctataatgggaaacaaaaaacaattaaccaccaaagagtgtgtgacactgtgcggcttattgtgcagaaattgtataatgttcacggaggatggaagtggcatggcatacataaatgacaaccactgggaaacgataacactcatgcgagttgcgcaacctggtatggtagaccactgtgtcttagttgaagttgaaagaattacgataactgggtttaaagcagatttggtgcctgcaaccattgaaccattagtttcaaagtctcgctgccacattgacgacaaagataggttagatttggtagacaccactaaaagttgtttgaatcacgtccatgtagatggagaaggaatcaacctccagatgaatcgttgctttacagatggagtggtagaattggcggaatgcaagttagtaatgcccccactaaataacttgatcccgagactgacgagaaaagtaatgtgcaattacttaattgagcgcgtccgagtcaaatacgaggcagttaatgaagatgggaaaactgtggtcagaacagaagagaactggtatgagagtgggagtgcgaatacaacgaaacctggagatggtctattgatcagctcccaaggcggctacaagttagtcatgtgcttagcaacagcgcaaggagatgtagatgatggcttcaagaaatacgttaggttaacagaggaccatggtcaaatggccgtagtttttgattgcggttaccacatgatagaaaaaaaattgcgagttctgactagccggccaaccaacactgataataaagtttgggcattgaatatcgagtcacaaaaatatgtagaaaacagcttgggtttaagaactgctgttggtgcaggtgaaggcattttgcacatataccattacgacaataaaagtcaccataagtataatgagaaaaacattttagacaactttggcattgatcaaatggtaatacattccgttgtcggaaaagatgaaatcaattggaattacaaagcactcctaaaggacaggagtacttttagagctgctgtactgtatggagtgcctacgatgattatgtattgtgaaacggatgatgaaaccaacattgcggagtggtggttcaaatatcttaaaaaagacattttaaaggatagaagacttgtgttctcatacaacattgatagtgtgaatgaaataagaaaaattaatgagctttatgaattatactcggaagaatcaaaaaataataatacaataataagatacaatgagtcggatatggacacgatggacgtcgaggatgtcatcaatgaagttagttactatggtgatgatgatagcacattgcgcgctctgctgatttcactatctaccaatttaatgcatgaaactggagatctggtgtattaccagttgcgtaaattaattgagccattacaggtaaatgatgatgatttgttattaacaagtggcataataaccaatggagctgatagattaaatcacgtccaaccctggtcggacataaccatcataccgttaaatgggagaaacataaacgatatcaactatgaatttgaacgggagagaagtctagacgacgatgagaactcaaagagtggagacgaaagtgagattgacgaaagtgtctcggcttctaaatcgggattattggaattggaggccagtggtggtacaaaaggagatgatacgataagaggtatagaaacatcaacaacctctaagaaacaaatgatggttaaaacagttcatgaattcgtcaaaaggtacaaaccagatgtgagtaacagtgccaactggcccgaaagggtgcaacaattaactggtgccccgagttcaacattgagtgacacaactctagttgagccctacacaaaagtgactgttaacactgacatagtggatgaatttggaagtgttaggcagaatgtcaaaagcaataggagatggtatgtgcaatatgggagattatcactgtacaacccgtgttggtggtacttagcaataccggaaatgagagagttgcaacaatacaaaaccaaacataacatcaagatcaaaatgaattatttgggccataacgtttatcgattaaatagaatacggttcagggagaaagattcgatcttcacgcattgcgtgaaacctgaagtcttcttcgatatcttaaaacataacagtaacaatcaattagaattcccaaaagaattacaggatatagctaatcaatacctacatggaagggtgtcgtggcacgtgatatttggaaaggattacaacaagacttttgagcccacttgtagaagattaattcaaaagtttgagaaagtaatagtactaacagattatccatactcatataatggaatatgtgaagatgcaaatttagcatcgaaattggttcttattaaattagccagtcaatcggaaccgtgtagagccatatggtggaggttttcaatattgtacgcagacattcccgatgactgtgagctatacatattaaatggaagggacatgactgaagatgaattcaccatgattgatattttaatggaggaagacatggaaggatttgacatagtgagcgccctccacagccagacattcaatgtgtgttgtggttacgcgaaatacaaccatagagttttcaacgattatgcaacattcagagacatatatgataaatatggaaacagttatggaggtgacgagatatttatgtcgcgatttcacataaaaatgatgtggttacactacttaatacacggcgtgttatgttatcaggtggagggaaaatggttgaactacgcaaataatacaacttttataatagaagtcactaagggtacaagaattcgtatagacggtgtaactggactattctgcactgcaaacttctttgaagtaaatcatgaatcaaaaggaatatatgactacacatccataggttggaccgttgatggaatcctatggaaaaggggactgcaagactgtgctgaaagattagatgaccaaaaaatcaaatggtggctgaacaaggagaacgtgatatcaaaacaaatagatagtcaagctaaactgaaccaaagcgtgcaagtaagagaattgattttcaatagcaatgctgaatcagttgatgaattagtggttgagttggtggaaaacgtggataattgcttaataaccattagaaatgtggcggaaagcagtattaagataagctcaactgaccaactgttattagtgagaataagaataagtaaagaggtaatagaaatagacggttcaattgatcaaagtacaaaaaattttttgaataatcaaaccatgtgggtgaacacagacagagttcatgttggttggagcgcagaattagtcaaattggtgcaaagcagatacaaaggaaaagttattgttgtagaggggatggttactaaaatggtagacttaatgttagaaccacaatttggctctggtgtgcacattggaaaggaaattgatgaattaatatggttgcccaagaatgtggacacagaattactaaaattgcaaaacttggagttgcaggtgaagaagggcaaactaactttgggttcaactgatgagaagctgtacaacattttaagactagcagatgtaaacgcttggcgctattggttagaaacaggaaacactcaaagattgctgagctttgattccaggatagttcgcagccattcggaatgtgttccaacagatctagggtccatggtgggtcaaaagttgccacttagtcaagttttacagaaaaccttagcagagtgtgctaaccacgtagatctcaatgactcagtgtggagaaaaatggtcaagagagatagtagtacagttctaattgattcaatcaaagatacagtattaaccacgggcaaaattaactgtgtccagaggtcctcttcaaaatccgtcatcatactatgccagggaataagtgtgaccatcgtcaaccaatcaagtggaggtggagacgtgactacatctgttgaaacggttgatgaagctaagcaaatttacactacctggaatagtttggttgaaagtggcaaatcaaatcaactcccattcggtatgtcccccactgcttaccaagaaaaatttttgaacgttaagaaaactactttatcacaacaggacaagctaaaccaattagagcattttgactttgtggatgcttatgcgcttttggatcacaacataaccgatttggtaccaaaagttggtattgaagcatatgatttaattcccgactcaataaaaacagattatgaattgatagagccaattggaggagatttaaacattaatgcggaattaggcgaatcaagaaacagagatgtaaacgctagaataatagacttatgggaggacacagacttaagggaatggataacaatgtatggcccaagaaacaaagtcacagttcatagcagggtggatccaggtccagaaaaaattaacatcaaaaccatacttggcagccacccagcttatagtaggcctgtagtttcaaaaacaattggaatggaatttaatgctgtgacagggaggctaggaaacatgttgctattacgaaaggaaaaaattaacatacaacatgaaatcagaaaatttagatccgcgtactacagacctgattggcaagaattagttgcgagttacaaaaatgacacagtaacaataaatgataaagacatcaagatgtggttaagcaaaaggaaagattggttgtcattggcgaccacaacattaaggttgcttgaaagtgggttatcgcataaccccatgaacaaagtgaatgtccatgttaaaactgaatctctgctaaagtccaatccgatagacaattggaggaagacacagggaagaataatagtatggcagccaaaagaactatgtgctttaatgtcaccagcattcataacaattaaaaagagattgaaagaaatattaagagatggtgttttatacacagacggtttgacaccagacatgttatcatctaggttaagaaccatacagtttgattacatttttgaagacgacttagaaaaacaagatagacagactgaccaagaattaatagatctagagtttgaattgatgttagaattaggtttggatatcaaattagctaacttatggagattggtccacaataggtggagatacaaaggtaaagagagttggggacaactagacgcaatgcgactgactggtcaagcaactaccgcactgggcaatgcaatcaccaacttatgcgtgcacagcagttttgttatcgaacacaagcatgcgatcaagctggtgatgattctgggtgatgacaacataatgtttctaaatgagaaaccaagtttagtcaaatacaagagattgatgagtgatagatacaatatggtgagcaagccaaacattgatccaaacgtaggcaccttctgcagtttaatttgctacagaaatagctttggctcggcggaattgggaccagacttaattagattgaaacgaagatttgaggtaactgggggtgggaaccaatacgagttgccaatcgaagttgttcaagtaaaaaaaattgatgatagttacaaaaccaaatactacaacggacggtatatactgaatttgacggatgaatttaaaaatggaaatttaaacgtttgggctacaaatcatggcaacaggagttacatcgccatactagaaattgacactgatctcaagctggatgataaggcatataggaaacatgatttgcgagataaaaacccggaagaaacttacaaaacgcttataaaaataggtgagtccatgggtatggcaaatgcgattatggctggtggcatgtcgtatttgcacatgatagggtccacaaaagaaactgaagatattaatcgtcgcaagggatatgggttgttattgaccaagtggtatgatgttctgagctgcaaaaatgctatatgcagcaagtatggaatgtcaccgacagaattagatgaaaatcttagagatctgttggaaatgcttgataaaccattggtgacacacaagagattcaagaccatatcgaacttcttacaatga

SEQ ID NO: 1228 - DNA, 8166 bp, Macrophomina phaseolina endornavirus 1
  source 1..8166: mol_type = other DNA
atgagaaagaaccttacacacacaaacaaaccttctgagcaggcgactcgtcagcccccgcctttcagaagacctcgaggggctgacgagataaggatggaaaagatgcgcgcgctggtacgacgcgcgggggattggtggcacgacgacaccctacccgttgttactgctatgactgcggacgatttagacattccgctatgcgaaggatgggaccctttgcgcttgacggcggggcttctgcctgggcccgctgatgaagcgttgtggggctgtcaatggggcagcgggtctcttgctgccctgagggtggccgtggcattgcatcaagccggggaccgctacttgacagctgagcgcgcttttgaacccaacgcgtgttacggctgggtggtgaaggcgtgcgactgctggaaagaggtgccgggcatggcgtgctgctgctgggaccctgtggtgataagcaagtacccggaggattccgctcctgaggcgcgtgaggacggcttgaagtgggcgcttgctatgttgaactgggccggttggcctcgtgcagcagtgcacgcggagcaggatgcatatggatcggagtgctcgcggctgcacaagctggacgggcgctggcaagtgcatggcctgagcggctctgcagtcgcttgtctgagttgcaatgcaatcaacgtgttgatgccgggagaaagccgcgagattgtgtgcggcgcttgtgcctgcgaaatgttgctgaattttgaccctctaaagttgagcttagaccgcgcaatattgttttggcctggctggtggctggagttggttgatagagcggtgcggattcgggtgtcgaactaccctgaatggaatcgcacgagagctggtcacctgcgagatttgttggcaggtgccataggtgacagggcggatgccatcattgcaggaaccaaattgggcaaggtgttggacgcgcgggatgaggcaacggcaaggaagatcatacagatgtcagccggcagggaagtccacgtggacggggccatgtcggaagacattctcaaggatctcgtacggacgtttcccgattacgagattataccgacattgtccagtccccacaaacacggttttcatcacgcttgtagggtgatgctggaagatcggtttctccggcgaattggtacgcacgtcccggtgtacgatgtggggggtgcagttcaccgtcacgtgcgccggaagcgcttcaacgtgcacagttgccggccaatactgagcccggacgattacgcccgccacgctgaacacaatgctgacactagcaacatgctgggaaaccatgcccgcaaagctgcacaagacaccgccggaaggccagtatcaacgtggggtcctgtagaacaatgggccttgaacgcacggactcccaagctggtagcatgtgaaagtccggccgaggcgtgcactttccgtgcgaaggtgccgggagcactgttatacgtggactctctgtacgacgtaaggccggagacggtgcttgctcagatgtgcaaccacaacgccaaccggttcctggcctgcatgaccattcctcctgcggtttggagtgataccagtggatggctggctcacaacgagggtcgctgggtgctccgggacgagtggctccacctctcattccggggttcttcacagacctaccggaacaacttcaacaatgcacggctattctttgaaaatccggtgtggctggcaaaatctgcaggcttgtacatccgggtgcaagggtattacggagaccacgtgtgccttgaaggattcggcggcccaatcgagtatttctcagccaatctgcaatactttacaatgtggtttgatgaggacaccgacacagctcgtttcaccatcccgcgtccgagcacttggatggatgcactgaaacaggtagccaaaccggaccagggattcaaggtgaatcgcaagtttttggagctagtgcgcagccggttgctggcgaatccgaagacagatgtggattcggtgctggcttttgctagagcggcgcaaaacgctcaataccacttgtcttcggggaggatgagtcgttttcgattgtccacagacgaggtggtcgatcatgtcattgtggcgctagttctgcatgcaaagatcctggagcggatagagccctacaaggcaggaccgaggaaagtggacgtgtgggacaagctaaagaagatcgccatagacagcactcgtgaagttgtgcaagccggtgcagacgccaatccgctggtacaagcagggctggagtggttgcgcaactggctgttctccgggcaggagaatgtggtgcaggacgcgaactgggcagtgtattggcaacttcgcgattttgtagacgaaacatggtgctcgcgtacctaccgccgcggagtggtgcgcggcctagagttgaccgaggacaaatgcccgccacgtcctgagactatccattttggacggggaccgtgggtgctccatgagggcgaatttggtgatggggtgagcgtgcggcgcctggcccagccggcctccgagttgagcgtggaggccgaggttcaggctgccacgacgagttgggtgcatcaaatacgggctagacgggagggccaacctgcgccccgcgaacgggaccacgccgggcggccagagccaaggcccgtgcaacctggaatggacggagacacgcccacaggcgacttcacggtgaccagcgaccggatcgagttacacgactcagaagaggaattggtggcttccgccccttttgaagtgttgcacgggttggtggaccgctcaggcgcggctgcggacggagcaacgcttcacgaggaattgaggcatgtcggtgcggatgactcggttaccgaagggccggaactatcggcgacgctgtcgggcgttagtgctgcgccagtggcagaacaccaacacgaaacattctctgtgccggaagctgaggagacgacagagatggcggctgacggcgaggctccgacggcagtggcggccgactggccagtcgaggccctgccagatgacactactttcggactgggcacggatcagcacggagtggttggcaacgcccagcaccgcagtcttgggctggagaccgagcgcgccagaaagattgcgttgtatggagctaaagtgccagccactgtgctgacgtggatgttggagggaccaactagactgcggattagctggacatcacagttgggccgggtggaatcgggccccaccgggcactggttgttggatcgcctctccctgctgaatcgtgagccaactccgggcgatgggctgtgcggcatgcacgcagtgcatttctttgcccctgacctggacaagggccaattggagattatgtcggggcgcaaagagtggtggtcagccgacgagctgggttcttgggccaatgctggcggttacaacttggtggctgtgacgcaccccggaaggggcgaggcctggatctgttccgcagatgcgcccgtggtagctgttgtgcacagcaacgcgattggcggaatggggcaacactgggagagtgcgcgtgtgttggtggacgaagtgccagtgaattcacgagtgatcaacccaaggctggatgaggacggccgacgcgcccaggcatacagtcgtgccgcagccgagctgtggcagatttctcctgacgaggtggagctggacggagcacccagcctggaactaatagagcgcgccgagtctagtctgcaggcccagtgggaggcggcacgcttcgtgtgcaagccagacggcgatgcggtggcaggtttgctggtgtttgagcaggacgaggaaaggattttccgagtgtgttcttccgatgcacactcggacgctagcatgcttaattccatgctacagggcctggaaccattgcctgatccacaggtggttttcggcacggacacgctggatgaagcggtggcaaagattcgatgcaacgtgggccgagccataatagggcaggccagaggagaagcggcaactgggccgacgtaccacccaggacccgtaggagccgcactggactggttggccgatcacggagtaaaaccgggcgacgccctgctggtggacgggaatgtgcgctttgctcagggctcggtgggacggcccgcagctcagctgcccgcccgtgagtggcggttgtacacgaacagtctggtgagcttgatcaagcgctgggtggcttgtggagcaacatccggtgactggggaaaagtggatagaaccttgggcgggcccggcagtggaaaaacgagagccctgcacgagtccgacttgccctggtcagtggtggtgccaacgcgtcgtctcaagacgaagttgatacagtcgctccgcggacgcggctcggtacacactgtggaagaggcgctctgcttgcctagcgacaaaggccgtcggatctggttggacgaggcgggcagcgtgagcggcgatgacgccacgattctctgtggtaagtttggccctatgatgttgtcaggcgaccccgaccaaatcgggccggtgaccgagcccactgtggccacgccttgggaagagtgggccggtgacgccttggagcgattgccagtttctggcgcggtagtcaagttggctgggacccgtatgccaggtagcgtggagcggttcctgctcttgcctgacggcggcaaggcgggaacattaacagtgcagaaattgcgaaacgaacaggccgtgagggaggccttagtgcgactggacagagctggcacgcttgtgctggtgtttaggacgagcgagctgaagagggtgcggactctgcacctagatgctgatgtggaaaaagtgcacagcttccaaggcggggagagagagcgggtgatcgtcgtgcaactgcgcgcaagcggtgtcagtggcgatcccagatacctgtacagtgctttcacacgcgcttgcagggagttgattgtgctaacactggcagacacaacggacacagaagtacagagactgggttacatggccctcacggagacccgcgggggctggctacctggctgttttccgcagcacgtcgagagcttattgcggttggcgtgctggaacgaatggttgttgctggacgctaccgggcttaagttgggaccctgggggccggtgccttggctctcgaaggctgcacgcatgatgcacggcgcgctgcagaccttaaatgactggattgagtggtgcgcgccagtgagagatgacgggcacggcgaggccaagagttcacgcgattccacggcggtggtgggcccggcaaggacggagtggccggcaatgcccgaccatagcttgtgggagggcttgaggcccgccctcgctgcaggggccgacacggtgtcgaaccccatagtgaggatggcagtggacggtacagtggtcgtggcaagcgcggatgacccttccccccccccccgggctagcgtggctgacaggctccgattcttgatgggagaaaatttgccataccccgcgaacgagccgcaggggaaggaagaagaacaacaactgcgctgcgtgagtcccaggccgctgagcgaagcggaggacgtggagcgagagctgaggggcctggaattggccatgcctgcgcgccgcatcaccaccaaggagtgggaatctttggccctccctcgcgtgtggcgaacagaggcattggactggttggaggggaccacgggcgaagctgtgtggcgcagtttgccggcagggttggtggtgttgtaccataacgaggagctgtccgtttgggcagacctggagtgcccggtcgagctgagcgcgttcgtggtgctgaccctattggaggtggcgggcagcaggcaggcgggggcgaaagccccacggggcgcaggcccctggttttcgctggccctctccttcttaggtatgatggtctacgtggctgcgttgacattggtcagcagcttcgttgcgtcatgggcgcatcggctgtctcagacgccgatgcgggaatggggcccagcgctaccccgcagacgcgatatctggctatgggtgcagagcttgaagctacgagccgggttcgctcgggtctgggtccccgctagttggaaggatgggaccccaatgcgagagatgccacgggactggttgagcttgacagccgcagaactggccgtcgcgtgtcaacgaagtacaacgcacggctcctacaccatggccggggtaagagtggtggtgacacctcgcagagaggagggggcttacacgatagtgctggcggatgccggggatgagggttgtgcgtggcgagtgcgagtgtcctctaccgcatgctctgtgcacgtcatcctttgccgaacccatgatcacgcgtgcgaacctgccatgctacaggctttgcgcttgacaacgagcgattcagatgccccactgcggggtggaggcaaggctgagttggtgtcccggtggagcccttggactccattcccagaggagcggcacacaggagcatcagaaacttggagctgggtgacaggagccgtggctgccagcatcggggtcggcagcgttccgttgggaccgacggaggccggaacgcgccatccggagataacaggggacagcggcgatccgcacaaacagcccgtgtcggacagcaagctggaaatcacaacagcaatggactggttggactccacacaagtgctggaactggcgccaatatcagcgccccagcatgggtcgatccgggccgatatgtgggcgttcaagccacaacaggccgcgatcatcaccctgggcggcatgtcagaccacagccggccagctctggtgcggctgtactccgcggtatttaatgcagtgagtcggcggctgttcgctaccaagcgctatcgcgtgaacgccttggacactctgtcccatgtggcccggatgggccgcgtgtactgccaaggggccagctggaaggtggcagcagagcctgtggcactggacgaagaagccacggttgcatgggtggaggccgctgacaacccgcaggccttagcgaaagagatgcaggccgtgtgtgagagggcattcctgaccacaggattggaccacgccacggtgttcgccaaaagggagactctgacaaaggaggctctcaaggacagcagcttggatgggatggccagggtcatagtgttccattcccgggccgtggccgcagtgatgtcgccaccgttcatgcaactcaaagaccgcttgaaaaaccgtcttctggatcatatcgtgtatgtggacggcacccgcttcgatgaagtggaggcgttggtgcgcaacaccaaggcacggtacgtgctgagcaacgacctggagaaacaggatgcccagaccgacgcagaccaaatcaacgttgagatggcaatatacgaacagctgggggtggactcagcactgctgaacctatggcgactgtgtcacgagcaatggcacttgagcgggcccgccggaatgagcgcgaagcgcaacggcatgcggtggactggccaggccaccacggccctgggaaacgccatcaacgacttgtgcatcaattgcaaagtggtcgagaggttgggctcagcactgaagttgatgatcttcttgggggatgacaacacgatgttcgttgaccaagtggtagacttgtcagatcttatggcgctgactaaagccgagcacaacaccgtttgcaccccaactttctccgagagttacggcagcttctgcaccctgctaatatcccggcagggagagagtgggtggcgtgtctatcccgaccttgctcgattgattgatcgggtgcgcgtgctgccctcaatggccgtagaaatgggggacgtggaggcccggctgttgagttactgtcacttaatagggggcattccaagcgtggtggaactgtgcaaggaaaaaggatggccggaacctccacttgcaccgtatggtgaagcagaactgctggcagcgcaacccgaacgggacattagctggcatagtgggccgagcgctttggcggcgttcgtggaattggtgcgcaatccggatgtgcagagacacgagtacacagtgctaaggaccaaggagttgtga

SEQ ID NO: 1229 - DNA, 8121 bp, Macrophomina phaseolina endornavirus 2
  source 1..8121: mol_type = other DNA
atgacacgtaacgaacacacaaacaaaccttctgcagcggcgtttttccagcccccgcccttcagaagatccacaagggctggagaaataagacaacagaaactgcgagcgttggtacgccgcagcggcgattggtggcacaacgatgtgctgccagccgtgacggccatgacggcggacgacctggacataccactgtgtgagggttgggatcctgcgcgattgacagcagggttgctgccgggcccggctgatgaagcattgtggggctgccaatggggcagtgggtccttagcggcccttcgagttgccgtggcactgcaccaggcgggtgatcgatacctcacagcagagcggccctttgataacgccacccagttcggctggtccgtcacggcatgtgagtgttggctagaggtgccgggcatggcttgcatgtgctgggaccccgtgattgttagtaagtacccggaggactcgccggaagaattgcgtgccgatggtctgcggtgggcggtggctatgctggattgggcaggctggcctcgcagcgcggtccatgcagagcaagatgcgtacaagtcggagtgttcaagagttcacaagagagaagggaagtggcacattcatggtctgaacgggaccgctatcgcgtgcctgagttgtgacgcggtgaatgtgctgatgcccggggagagccgggagattgtgtgtggtgcctgtgcctgcgaaatgttgctcaacttcgatccattgaaattgacgattgaccatttcacgttgttttggcctggctggtggcatgaattgcaggaccgtgcggtacacattagggtgtcgaactaccccgaatggaaccgcacacgcgccggacatttgcgggacttgttggctggtgctataggcgatcgggcggatgcgatcattacaggtaccaagcttggtaaagtgctggacgcgagggatgaagctatggcacgcaagattattcagatgtcggcaggtcgtgaagtccacgtggacggcgctatgtcagaggacatactcaaggatctcgtacgcactttcccagactatgaaatcattcccacactgtccagcccacacaagcatggattccaccatgcttgccgcgtgatgttagaggaccgattcctccggcgggttgggaaccacgttcccgtggtggatgtcggtggtgccgctcatcgacacgtgcgtaggaagcgtttcaacgtccacagctgtcgacccattctgagcccggatgactatgccaggcacgctgaacataatgcggacatcagcaacatgctcggcaatcatgcccggaaagcagcgcaggacactgctggtaagccggtggcatcatgggggcctgtggagcggtgggcacttgatgcccgcacaccgaaactcgtggcgtgtgaatctgcagcagagacttgcacattcaggggcagcatacccggagcactgttgtatgttgattccttgtacgatgtccggcctgaaactgtcctggcgcacatgtgcaatcacaatgcgaatcgattcctggcatgcatgaccataccgccagcggtgtggagcgagactagtgggtggctggcgcacaatgaagggcggtgggtgctgaaggacgagtggttgcatctctcgtttcgtggttcatcgcaaacctatcggaacaacttcaacaatgcacggctcttcttcgaaaaccctatatggttggccagaacggccggtctatatattagagtgcagggttattatggcgaccacgtctgcctcgagggtttcggtggccctgtggaatacttttccgcaaacttccagtacttcactatgtggttcgacgaggacaccgacacggcgcggtttaccattccgcgtccttcgacttggatggatgcactgaagcaggtggccaagcctgatcagggttttaaagttaaccgcaagttcctggagttgattcggagccggttgctggccaatccgaaaactgatgtggactctgtcttagcatttgcccgtgcggcccaaaatgctcaatatcacctgtcgtctgggagaatgagccgcttcaggctaaccaccgacgaggtggtggaccacgtgattgtcgcccttgtgctgcacgcgaaaattctggagcggatcgagccatataaggccggcccgcgcaaagtggatgtgtgggacaagctcaagaaaatcgccatcgacagcacgagggaggtggtgcaagcaggggccgatgctaatcccttagtgcgcgctggactggagtggctccgtaactggttgttttcaggacaggagaacgtggtgcaagatgcgaactgggccgtgtactggcagctgcgcgacttcgtggatgaaacgtggtgctcccgcacgtaccgccgcggcgttgtgcgcggggttgaattgacggctgatgtctgcccgccccgccccgaggcggtccactttggcactgggccgtggactctggatcaaggggaattcggttccggggtgagtgtgcgccacctatctcaaccggtccgagagttgaatgtggaagctgaggtgcaggccgccaccgtgagctgggtgcaccagatgcgcacgcatcgggaatctgggcggacagagagtgggttcaatgtggtccgccagcgcgacccagagactggactgcccgcagatgccgcccacgacgagggtttggatgaaaccatgccagacatattcactgacgaccgcatcgagctgaaggacgcggaagaagagctggtggcatcagcaccttttgatgccctaagggctgcagttgagcgcgcggagcattcgcagccccctgaggtgcatgacttgcctgctaccagaggcgagcttgggtcgggcgcggaaccaggcgcgaacgccaatgtggcggatgcacaagacacagacgcagtgctgccactgcaagagggctccgtgccacctcctccgcaggaagacgactggccggttgtacctatcgttgacgaccacacgtttgggttgggagcagatgcccctggggccacaggcagtgcacagcacaagcacttgggggtggacacggagcgtgcgagaaagctcgccgcctttagtgagagggtaccggcccacatcatgagctggatgctggacggaccgcgccgcctaacagtgcggagctacggtgccaacttggaaatggccagcggagagccgggtcattggctgctggatcgcctcagcctggtgaatcgggaaccgacggctggtgacgggctatgtggcatgcacgcggtgcacttctttgcgccggacttggacagagatagcctgataagatcgtcgggtaggcgggagtggtggtccgccgaagaacttggctcgtgggcaaattctgggggttggaacttagttgctgtgactcgtccgggggccggggaagcatggatatgcgacccttcaggtccggttgctgccatagtgcacagcgaggcgattggaggtttaggtcagcactgggaggcatgcagagtgttggtagatgaggtacctgtgaacgcgcgggtgattagccctgctctcgaccccgatggcaggcgagccctggcgtacagtcgggcggccgccgaattgtggggcgtgcccgtgtctgaggtggagctcgacgggccgccatccctagagctaatagagcgcgctgagacaaccctgcaggagcagtgggagcatgcacgcttcgtggtgaagcccgatggcgaggccttggctgggttgttactctatgagaaagatgaggtgcgcattttccggtgcagttcgtcggacgcacacgctcgggcaagcgaactgaattctatgctccagggcttggaaccccttccgcaagccggggtagtgttggggaccgacacgctgcttgaagcgtcggagaagattcgcgctaatgtggcacgtgctataatcgggcaggtgcgcggtgacgctaccactggaccgcacttgttccctcgcgcttcggcggtgtcgttagattggttggcggaccacggagtgaagcctggcgacgcaatattggtggacggggaagtgcgcttcgtgcaaggcaccattggacggccagcggcgccgatgaacgtgggagaatggaagctgttcaccaacagtttggttagtttgatcaagcgttgggtggctagtttcgaggcgaccggagagtggggcacgatccaccgcaccttggggggtcccggatccggaaaaactcgtgctctgctcacggcagactccccttggacggcaatcgtgccaacgcgacgtctaaaggtgcgccttgcccaacagaggaagggccgaggagcagtgttcaccgttgaagaggcactgtgtctacctgctgataaaggccgactggtgtggatagacgaggccggcagtgttagcggggatgatgccaccctgattaagggaaaatttggcaccatgatgttgtccggcgacccagaccaaataggtccggtgctggaacataccattgccactccttgggaggagtgggcaggagatgccctcgagcggttgccctgctctggggaaacagttcggctcgcaggaacccgcatgcccggtagcgtagagcgcttcttgcttttgcccgatggcggaaaggcgggcaccctgacggtgcaaaaagtgcgcaacgagagcgggttgcaccaggcactagtgcgtctggaccgccctggcagcctcgtcctggtgttccgcaccagcgaactgaaacggctgcgttctctgcacttggatgctgacgtggagaaagcacacacattccaaggaggggaacgcgagcgagtgattgtggttcaaacgcgaacgagcggagtgagcggagacccgcgctacttgtacagcgccatgtcacgagccagccgggaattgatagtgctcaccatggccgatgtcactgacaaggatgtgcaacgcctccattacactgccctttttgaaaatcggggcggttggctgcccggccggttgccacggccggccgaggccctcttacgctttgcgtgttggaatggttggttgcttctcagcccgaccagtgcggatctcggctatgcagctgcgggcgagtggtgcaatgaggcactaagggtactgttgccggcgttagccacactcacacgctggctacggtgggtggcgggcacgcctcctgcgacggacgtgctgcgaagcagtacgtccccggcaccggctgcggactcgggggctttactgggcccggcgcgcagtgaatggcccccaatgcgcgagcacagtctttgggagggcttgcggcctagtctggctgctaatgcggacacggtcacgaatccgattgtgcgattgggagtggatggacgggtcaccgtggccagcgcggatgacccctcaccgccaccccggtctgccgtacaagaccgtcttaagtttttgatgggggagcctttgccatacgatgcgccgggtgatgcggaacctttgcgcagtgtgagcccccgacccgaacccacagacgatgatctggacgcggacttgcgcggtttggaactggctatgcccaaccgccagtgctcagaaggacaatggcggaatctcaagctgcctgcgtcctggcggacccaagcgttggattggatggagggcacctcaaatggggccgagtggcggagcttggagcacggactagtggtgctatatcgcgatggtgagatatctgtttgggccgatttggcatgccctgtcgagctggccgggttcattgtggtatggctcttggagactgtagagccccgcggtggcgcgaaaccgaaggctggggctggaccatggctctcgttggccatgtcgttcctaggaatgatggtgtatgtggccgctttaacgttggtgagcagcttcgtcgcatcctgggcgcaccgtttgtcccagacaccgatgcatgaatgggggccgcgcctaccccgtggcacggaggtttggcgctggatacagggcttgaaattgcgcttggggttggggcgcgtgtgggttcccaagtcatggaaatcaggggagaccttgcgagacatgccccgcgagtggctcgctctaacttcagccgagctggcggtggcagcccagcgcacggaaaagtatggttattacaccatggggggcgtgcgagtgattgtcaccccgcggcgtgagcaaggcgcttatacattggtgctagatcgcccgtctgtgaccgactgcgcgtggagagtgcgtgtgtcggggatggcggcctcggtgcacctggtgcattgtcgcctcagtgacgaagcctgcgagggtttggtgctccaagcactgcgcttgaccaccaactcggaagacgccccactgcgtgggggcggtaaagcggaactagtgtcacggtggagtccttgggcacccttccccaatgagccccacacaggggccagcgaaacatggagttggattacaggggccgtggccgccagtgtgggcgtgggcagcacgcctctaggtcccacagaggaggggacctgccaccctgaagttacattgggaagcgatgatccccatccacagccaggtgtggacagcaagctgcccttaaccgtagcgatggactggctcgattcgacacagctgctggagctggcgccagtgacagcacctgaacgtggctcgatccgggcagacctttgggcagttaaggaacaaaaggctgctataatcactttgggcgacatgtcagaccacagccgacccgcgctggtgcgactttactctgctgtattcaatgccgtgagccggcgcctatttgccacaaaacgttacagagtaaactcgctggacacactctcgcacgtggcccgcatgggccgagtatattgcaagggcgaaagttggcgagtcgcggctgacccagtggccttggacgaggaggctactgtcgcttgggttgaaagtgcgcgtgacccgcagtctttggctaaagagatgcaggcagtttgcgaacgcgcgttcctgacaaccgggctggaccacgccacggttttcgccaagcgagagacgctgacaaaggaggcactgaaagattccagcctggacgggatggcccgagtgatagtgtttcattcgcgcgccgtcgcagcaatcatgtctcctcccttcatgcagctaaagggccgcttcaagaatcggttgcttgaccacataacatacgtggacggtatgcggtttgacgaggttgaggccctggttcgcgacactcgcgcgaagtatgtgctcagcaacgatttggagaagcaagatgcgcaaaccgatgcggaccaaattcaggtggagatggcaatctacgaacaacttggcgtggatagcgccctgctgaacttgtggcgcttgtgccacgacaagtggcacttgagcggaccagccggcatgagcgcgaagcgcaatggaatgcgttggacggggcaagctacgacagccttgggcaatgcaatcaacgacctgtgcatcaattgcaaaacagtagagcgactggggccggccttgaagttaatgatattcctgggtgatgacaacactatgtttgtggaccaggtggtggacttgacggacctgatggcgttgaccagggcagagcacaacacggtgtgcacgcccacattctcggacagttacggcagcttttgcacgttgttgatttcacgacaaggcgagctgggttggcgcgtgtaccccgacttagcacgattgatcgaccgggtgcgcgttttgccggccatgcatattgaaatggccgacattgaagcgcgcctgctaagctactgccacttgatagggggggtgcggagtgtcgtggacctgtgtgaggaaaaaggatggcctgttcctcccacggcgccctacggcgaggcagaactgctcgcagcacaaccagagcgggacgtgacctggcattccggacagagtgcactcacagcctttgtggaactagtgcgcaaaccgagcgtgcaccgacatgagtacacggtgctccgcactaaggagctttaa

SEQ ID NO: 1230 - DNA, 16344 bp, Morchella importuna endornavirus 1
  source 1..16344: mol_type = other DNA
atgccatcccgcgctaacaacaccacatatcgaatgtttatcaagcacactaaattttacaagaataaaccattctgcgggtttaaaaatacagcagataaacaattatcgaaaaccattcttcgccagcaacggcgctcgatattgttgaaaagaacctcatggcgaccaaaagctgtgagaagaatggaaaaaaatctcaaaatccaagccgaaaaagaaaaggctgagaaattgagacaagaactcttaaaaattgcccacgaagagaagctgaagatagctgaaatgaagcaggcaattgagagggttattttagaagaacaaaaccaagaaaaacgcaacagcctaaacacacatttgcaaaacaaacagaacaccataaattacgcacacacgccagtgagcagcattgatggaaaactgaccggaacatgcaatgacggtaagacttgcattattgacaataatgaagagcacaaggtatgtttagtttgcaagaaattgttggtagttggaagcaaaccagaaccagtggtagaagaaattaaacccgctgctgaacccaaaattggtgggaaagccgactgctggtcacacttgccaattgacattcacaagagaggatgggcgatagcttcgggagctccgtttaaattcaacgttggcagtaaaaagcaccagcatagcatgatggcgaagtatcctgatgacccaatgcccatttcagaaatcgtgaatgacctgtcttacatgctcaaaaactccatggctaagaggaaatatttgaacaccaagtatctagacctgatcctgttggataatggggattatcatttggaagagggtgatacataccatgcaggcgatgtttacgaaatactgaaagcaaaatgggattctgttaaggacaacgtcaaacccattcaaccgacgcaactgcttggtggtgaggagaactgttatttagccctccccatttcgcctagatccatgagaattaagcacacgaagaggattatgaaaattagcaagatggtcgacccaaagccagttgaggagattgaggaaaaaatgagactgttcatgaacaggccagaaaacgctaaattcatgaacctcatgtggaaaattcctagatacgttctggaagaattggcaccaggaaagtggcacgttaggttcggagaggataatgagcaatgtgtatcggcttgtcgagttttggaaagactgggcgagatggtgcaaatcaacaaagacaacattaaagctcaggaggcagcgacaaagactgtagaaccagaggaatggaagactgtcctaggcaaacccgggctctatcgccatgactcaggttacgaatcaactgaaaatattgatatcgtgtactgtcaattgggaaaaacagctgtcggtaagttgccttccatgccaaaacccaaagtgataaccatgggttataatgctttagaagaaattgcgaggcacactggcatgcataagagtgatgttgttgatttaactgctgtcgccaatgctaaccgagattatactgccaccatcgtaaaggccgtctatggaggtcttaaaaacaaattgcaccacgccggacctgtggatgacaagaccttgagagccttaactgatgcatttccagaatacgatatcatcaggactccaggatcagcccacccccacccctttaacgcaactgctagaagcttggtaacaagtatattgtatgaaaggttaggctatagacagaccatcatcgacattggtggcaacgcttatacacatagtgttagggataggcataatgttcattgttgttacagaaatgaaactatggaagagaaagacaaaaccgtggatatagtgtcagcaatgatggagcaagcaggaaagtcatatgaaagactgctggcaggatcagacaaagcgaatgacgcagcaataatggcaaaccttatgaacaaaattgaaaataagatgtgcctgaacagatgtgaagactgtgactttattggagacaaaaaattcacttattgtatgtcagtggatacactttatcatatgactacagaacaactagcattgtctttcgccaaacacaacattgtccacggccttcatgccatcttctttccgattgacgctctcgttgtcaacaaaggcaatttgcccatgaatgaaggaacgtgggaagttgttgacggagaattcagaatgagaacacatggagacagcaaagtttacgctcatcctatggacaagatcatccagtggttgacaacacccatcattgtttgccatgatttttcaatagttgtgagaattgaaggtttcagaggaggacacattatcatcagcactaacagaattgacaacaaattcactgttgaagaactgtatcttaggaatgtgtggatgaccgatacaccagatgaacaaatttatcaaatccctatcatcgatgtttatgaacccaaaggacttttggacaatcgtagcattaaggttaagacggttaaaataaacagtaggttgttggatttattgtgtaagagaattgctgatggaccggaaaccccacaagagttgctcacttatgctaaaggcttgacttatacaatccacaccaccacaatcaatattttcaggcctttcgatgtgagtgacgagtctttgcaggaccattgttgcattgccatggaacgcactacgaggttgttggccaacatgaaaccattgtttgatcatgctacttccgcggtggaggagaaagcttggcactggacagcgttggatgctctgattaatttcggtaagaaattcgcgttgcacattgatcccacacaagtagatgttattaaggagttcattagagacaacaggactgacaacatttatagtttcaaaaagttaagtgccgatgccgttaaaggatggcaagcatttgaaaacggatacttgtcaggagccaacgtggtcacttataagtctggagccgtgtaccattctaacatcaccagcccatctgtgtacctgaacaatttcgagatgaaccttgcagtggagaacatgccgcctagtcacactagcaaggggcgatttggtaataacaaagtcaaagccgccaagtgtgaaccattgccttcctgccctcataatcatgatcacgtgttcgaacacattgccaccggattcaaatgtgtttgttgtggtgttgatgatattttgcacaacatgctgtgcagtatttgtaatcaggataccaaatgcaaaccgacagctgcttgtgaccacgagcataagaacatcaaggaacactgttgtggccagttcaaatgcagttgtgttttgaacattaggtgtgaatgctgtaggatttttagtgctaaaacaccttgtaacgcttgttgcaaacccacgagaacgagagccaaatgggtcggtagcgtgtcagaatggtatgccaaagtgagaggatggaacacaaacgatcagggtagattagtcacaccaagcatttccgaatgcattccagtcgttgacgatcaacacggtcatgaatgtcctatgtgcaagaattggtacacacacagtcacaagtatgaaggaaaccttagacacgatatattcagaggtgactgcccattttgcgaagattcgaaaaacttgaaggttggggaaaaatgggagaatgccgatgacgaagagaatcaacaagacggatggttcagttctggaaacctcaagagtggaaaacctggcaaaaaagaagaacaacccggatcagaaggtaaaactgatggaaagaagtcgacacagccgaaccccccaaaagacaaaaatggaaaaggaaccaaggagggaaaagtcgagaacaagtcagaaaccaaggatactggtaagcgaggaacggcctatacgaaggaacgagagaagaccaagttggaagctgtggaagggtacacaccaggtgttaaggtgtggaaccataaaccaacagacacagtagcggttaacgacgatttcacacataatcatcgatgcgtgaaatgcggaggtctgtatcaacacacacatcgttattcgtatttgaatcatgctcagcatgtagatgaatgccctcattgcaatgatgatcctaaaccaggaaaacgctcacgtgtacgacccatctctagcatgagtgaaggagccactgtgaaggtgggacccaaaccaatatcaacaccatgcttcaacgccaattccgtctcaactgaatacaaacctaataagataatcttagccttggttagtaagtacatcacgcagcgcgacatgagagcgaaaccggaagacaaagttgagtataagaaccacaagaacgaaataattggtacttatgctgtgggcggagctaagaagacatacacgtatcggttggccggggctgacaagccattgaggaccaagctaccatggtcgctcaaagatgttttcgtgtttaaccgcagtttccaggacacttattctctaatcgactccaacataatgaccaacactgcgcaagagccttggaacgacattttagagaaaattcacaacaagggccggactaacaaaatgattgtcaatcatcctgatgtgaacgttatgtttagatccaaagggaaaattatttatgaccttgttgacaggttcagagtggtgactgatcagtttgaacccattaactcaaacaaccttacaagcaccatattgagattaatcagttattataggaaacaggctttggcgaatgaaattatttcggatgatagaaccacagtgtcataccccaaccagcacagaatgcacgtgctcgacaccagggattatgatgaagatgagagtgtagaaactggcacagatgatgagagcgcttccgggagcgacgatagctcagatcttgatctggatgaaaacatacagtttgttcacagtctcaacaatggagaacacaaggttaagattgacaacagggtaacttatgactggaagatcacaaaagatgttggcacgccaggttcacactggatcaaaccaaccaatgacgaaaataattacaggttggtgggtacaacacacgatcagatggatacaatgaaagttgaaaaaattgaaaaactaccaggattctcattaataacttccagcaaaggcatacaatggttggccaaaactccatcttacgagatcgacgatgatgtcataaactggtgcaaggaaaacaagtacgtcagcttaggacccgacgaagaaggatgcagagaaatcgacactcacaaacaaccagattggatacagaagaatgtcgttgcaaatatgtctgacataatgttggtggaaacatctctcgatgtctcacaatgcaacctgaatgacattgtgagcgttaatgatgtgaagtggttacaaaatgaaggcactggcgactgtgggtacagggctttaagacattttatggcactagacttgaatactgttgaaacgctgacaggaacaaccatgtggcatagttctgacgagttgggcatgttggctaaccacaaaggaaggaatttgatcacttacaagaacggagaattcaaagtgtacagagccaatcacaatccggagtgcatctttattatggatgctacagcccaaggattcaaaaaccattgggtggcagctcaatttggaaaatgttatggtaacattggccaggtccatgagaccaattatttcttcaggaagagagaatggataaaccagaacagtatggaaccagacatttcttatcttgaggctctaagctatgtgatgagtccagaagacaaggccacattccatgccactctgaaacactcaggtgcccttgtaccccaggtcttaaaaatgttggtgcccttcggcttgaaaaatactggtaacttccacgagtacaccactaaagttttcgacaggagcgaatttgataaattcgtggtccgtgaagttattggaggaagacaaatatcgcgttggaaccatcctacgtcatttggaaaaacaacacaggccccgaaaagattgctcactcattacaaaggaccttttgatcaaatggtgttagttgtgccttatgttgccattgctcgaggaacttgggaggattactccaaagattacaaacacctcagcatttattatagagccggtgagattgatcagttcaatttgtgcaatgctagcaacaaaaacgatgcggtaatcaaaatcttcacaagagccaccttcgccaaccaactggcatccagtccattgaaagagaaaactattgtttgttttgatgaggttcacgccatggatggatacttgtacaacgccttgtcatgcatgaaagtcaatcgcaaccctattattttaatgtcagccacgcaaggtgatttgtcagcttacaagcccgagtcaaaaattcccatcaacgtgaagtttggtaatgttgaacctagtatggttatgaaatatatagaggatcccgaaaatgctaataagagaattgctatcatttgtcccactgttacttacggcagggagaaattcaggttcaaccagaaactgagaaagcaggtagaagagatcaacagaaacagtttatctaaaaccaagtttgctaatcgtatttttatgtgcacgagcattatggctgtaggggtgaacattccaaagctagacgtaatatttgagatgggagaaagaatcgaagtattgcctcagcctttctcaaacgttatcacacccgaaaatgtatctaatgcaacaatggtctcttatggtggtgtgaccatggcagcggctttgcaaactttgggccgcgttggaagaggcagttctccgacagcggaagctttcattgccattcccacagcatccgatgaactccccttctcattttatatggaagcaggtattgacgtacccgtagcttttgaagacatgttgaatgtgcttaaaacttatagattttctagggcccataacccaaggaatgtatcatccgatgatctcgagcgttatcaaactttgcaaacattggcaattgcggcaaagaaattaaacgttaactataacatcttgagacctcagaccgcggatgaaattattcgatcagttctaacatctccaactataaagaaactatcgtccatgaatgctgttttgactctgggcgctaatcccgttggaaacaaatcccgcgctggtaaaccgaatgctgactcttggaacgcaacgtgttacgattgtggtgaaacattcatgtcattgtacgatttagaggggtcctgctgtcattccaacctagctagtgtaaataaggaaaatttagaaaccgtatggaaagtatcagagagattcaattggtcacacaagttcaacgagagcatggtgcccactctgaaccttgaagatttgtccaagaacgggagaatgactgtgaaagatctcaggaccatcctaactactgttcacgttattaagttaggcgatgatttaatgacagcgttcaatgaggtggctaccacgcaaccgtaccagagaaccaaaaagtgcaacattttcaaagttaacgtcaaacccacggaagaagggctgaagttcgtggcaaactatgatttatacgacatacaaacctcacgtggagtcggtttgctagtaggagaaaaaatcgtcacaccgtgcacgttcagtgaggggagaataaacccaagaaccagagtggaaggcatttgcttcttgattgtatctagaatgaaaactggccacattttgcacgagatgagcgcttgtactagccccactaacacttcattaaaagaaattaataaaagaattgatgaggcggatgtgaaatccggagtggcttcttcaggcaaaacacactatttcttatctagtggatatacaattgtgacgaaacaagtagacatggttagaaaggaccaaactggtcagttcgtatcggctggtatggctatgcataaaccgctgcccaacaaagtatgttttgacgaagctacgatgtggcaccgagccgaaatgatcttctataattgggataaggttaacaaggtggccttcattggagacaatgatcagatagcaacacagaacaacgtcaacgaatttctggtcttgccaactcagaatctgggcggtctattagccaaggatgagaacccgttgagaagagcaagaacagtgggaccacaattcggtagagccattattcaattcatgaacttcgaatacaatcctgactacccgaccaatgtgaaagttttgcctatcaacagtcccactgggaaaaaggtgatgcaaaaacttcatggacaacccatatcccagattgttactgtcggcaataaactacgtgacgaaataatgttggaattgtcgcggtcaaccgatgtgaaagttaaggctataccagttaccactataactaggtaccaaggaggacgctgtgaacacttggtgtgtatattcgaaaacgttgctgagatgagctcaagaacagaagtagcgtataccatgttaactagatttatgaagaacggaactttgttggttgaacctgaagctgcacgacacaatttaattatgaatgaagtagcggaaaaagccagaacgagtgttgattccgataacattcggtcaggtaatttgaactttaatattacttggacagcattgctgaaagaagtgaatttttttagaaaattacaagaacagtacaccatgatgggagagaatagggcttttggtagtgtagtatacttgctgtgcaaattgttccgcgttgatatgcttccaaggtttgtaggcaaattgataactgaaggcattattactgaacacaaaattgtcaacaacaatctcaagtgcgccacaaggtctgttattaacagttctatgcaatccgacccggatgtatcacaaatggaagaagcgatggaggaccatgatgaagaaaagggagttttatggcagacaaaatggaacaaggacatcactgattgtttggcggaacacaaatttccgatgccaaaaaagacgtgcatgaccacattgcgttattacaatgaagctgaaatacgattcatgactaatatagctggaaacgttaactcagattgcccacccccatcggcctattatcatgttgaaggcacaggttggtcaccagctcatcaagcgtatatcagtgtggatttgtcagatgattacgtatcaacaaacggtattatttataaaaacattcctgattggttgactgagaccgcggacgaggttgggcctccagtctttgatactgaaagaattgacaatatcgtagtaatgccaacaatggaagaatgttgctgccacgataatgggaccaagtgcttgtattgtgtgaatgtcgataatgaacataaaaatgccatgatgatcgattgttttaataggagagtcgtgttggagacaagtggtgaaggtttgatgtgcggactaaatgctatttcaatgcaggtggacattgatgaagacgttctcaaaaaggctattctcagcagtaaaaatgaggaaacgggggagaacaatttcgaaatagcagatttactcactggatgcgatcagatcggtcttggtctggtagtgaaaactagagagaattattattttgcaaatgatcattttaccggttctgataatgacgcatatgtttactatagcggagcccattattctgccacaatgttaagctcggagagaggtggatttttgtactctgacagtcaaacgccaaagaaattcgataggaaagccaggttgaagaaaatcctcaaagacgcttggcatcagcacgattatttcgtgaatgtgtattattacaatcacgtgtcaagaaggttgatgcgatggcttaagactttgtgggcatctttcaaacacaacgttagtgctgtcatagaaattatcgtcgattatcttagacgcgcatatctgaacgtgaagacagccattgtgggaggaacgcctctgcgattgcaagacgtagctactgcacaacacatggatgtattgatgaagttgaacgagaggaagaaccccacaatcaccatagtatcagacgacgtcaaaatattggaacccattgccccagaacactggatgaggaaagatttgtgggactggcctaggaaccccaacgatgatgaaatgctgcagtacgcagagtacctagagacgttcgactcaaatttgaacttaccagattggttctttgttgatgaaattatcctcactatggattccactggtgaaagatttaaaaacatcagcgttcgttcagccttcttcccgaagatcactgatgcaaacactaaagagatggagttgcacatgacgacaattagaggcctcagcagtccagagtggattgcggacgctaacgttgaagccaacatgaagatcataagtagccatagaaccggactatacaacttgtggacagagtggaaaactactaacgaacggttatctaaaatgaagaagacagtatttttcgatagtaacgataatgtttacaaacgcattcagatgggtttgtcaccatttgtttcagcttttagatcatcagataagatcgtactcagactggttaaggaccttactgtttcagatgatgttatggcctttttaaacgagaacggggtgttctttgagggtcgcgatttgctcaccatcagcttacaaccagaaaatttgggttgggaaacctacgatagatttagagtgttaatgcaaacacaggacatatttggagaagcacctttccctgaaagagaaaatctaattctatacggaacaactggctatgagattacaggtgattctcgcgatgacgccacgtggtcgtgcggcggcatgattgcgagccttaagtctaacattcttatcttgagaggatacaatggtaacatggagaacatgatcaacacttcttgcagttaccttattacgctgttggagtcttctacatcggatgcaaaagctatgattaagggcgccatggtacaccactctacagatggttatgtcactcaaactgtgggtcaggatcaaactaaacccgtggggcctggtaaccaaatagaagaaatcactaggaaattatccttgagattgcaagtgacgaatgaggtgaaagtcgacagtaattccatcatgtcatatctgaaatcatcattgatcggaaattacagggttattacaggacagggtttgaaaacggccacggaacttaatcagtctggattccttaaccgggagtgtggggactgtggcaaggtgagaggaacttatcagaaaacagcgaagttcacctgctcgatatgcttaggatttgacgctgttaaagaacaacctggacgggtcaacacacgcattaaggccgcggatggcttgccagctttttacactttaggagaatatgttaacacagggttgatgttggacattctatggagcaagaagaacaattacgaaaaaccaactgaagtcaaagggtacagaggcagtgccggaacagggaaaacttacaagctcgaaagagaccacgatatggtgttcaaggctggcgatttcaattggcaaacatggataatgtctttggccagatctgaaaccgccacggtcgtaattgacgaattgtcactcgtgccagccgactttattgcatggttaactcatcaaacaacggtatttggcactcttgatccgaatcagtcagaagctccttgcctattgatcgatcatactaaaattgaagtgatcactaacaaactagaattgttgacagtgtgccacagattcggtccattgggttgtaagttgactagcattttgtcgtcctacgaggtcagtgcatttgatggaaacagagtcgatcgtattgtcagatttaatggcaatttgaacacgtaccatgcaattgtggacgcggacataacgatcatattggaccacgaaactgagggaggagaaaagattttccaaggaaatgaagctcgtgttgtatccgtcgtggttatgccatctttctcatggaatcctgaatggcaaaaaatcctttatacagctatgactagatataaaactagtctattcatatggtacaagacagggaaaggtccgatcatgagtttcatggacatgatagctccagtggacataggtgcattagtcacagcgcgaggacaccatgatgtggaattattgaacgtaactctaaagctcaaaaacgtgagcgatgaggacagatctttggcaataatatccgtcggacaagaatacatccaagcccctatcaaagagccgaaagaattcaacagggaagagtggaattataatttcgctaatagaagaactagagagtcaatttatgaaaacatgggattctctcaaacttggatagccaaggcttcaggatcaaacatttacgcacagagaactagcacagccggagtcactttcttgacgtggggtgaagagggtcaaccagatactatcaccgccatgctggaagagaatctacagtcaaacggtgatatcattgttgagttgtacatgaataagaaacctacgatgttacagaagatggccgtaaaagcagcactgtccatgtggccaggaggatcaacgcccgaagagacagtatcaaactttaggaaaatgatcaaaccgttgcctggcaagctgaacgctatgattgaatcaagcagtgacgtgttttcaaaaatagcagggaacatcatcaattggtttcacgacatgttcatgtacattctgagcagtatcaaccatggagctgcaaagttggtgttcaacagtgagcagaaatattatgtagaagaaatggacattggacattatttggattatctgacacaagattcaatcaaaacagtggatggaccgattagcaccatcaaaacaatgtttgggtatgttatcaactacaacaatcttaaaacatacgtttcagttagaggacaaggcaaaactcagatagtaaatgtgtctgtagacgataaggccgacgggctgaaaggaattcttttgttggacgacatcatcagaatattgtctactaatcctcaactgtaccagggatcatacgaggagtacaccatgaaagattcggttattgtagatgtcagaatgaaagatatagtaagatattcgttggtgggtaacacaatgttgaaacacgagtcggataaatctgttatgagtgttcgaaacgaaatggggcaatcaatagaaatcgccactataatgaaaatgggagaaaatcgagttttgattaagcccaacctgaccaacgctgtgtcactcgatagcattattgccaacctcgaacacttttgcgatgacaacaaacgcggaggtaatgtgggagcatggaaagccttcaagttgattctcaacaccgtttggctcaagatcaaaacatggtatcacaagtgcagagtttacctgacatctaaacccatcaaacagcaaccagaacccatcacctgcagtcagggttggtacaacgacttcgtttacgatagcagctgcagtgaagaaggaaccagattcttcagggaatttggcaaatcatccacaacaactattctgagtgattgtgctatagtcgagaccaccaactcattcatcgtaatcgaatacaaacgcggagctatgcatttgaggttctctaggaaaatgagagagttcaaaccatttgtcgctcgaccttggggcgctgtgagcggatttttgagcgactatttgcatcttgcgaaagttttgatgagaaacgaaaaagccatggatcatgaacaatggatagcagcctggagtgcaagggaaaaagacagagttatgcagatgattgattcataccgaaagtacaaaactgagaagaagcgccagatattcggtgaccagtacgatgagcaaggattctttattggaagaaaagttacggacagtcctgtggataaatatgatactttcccggaaactggtcgaactccaagtaagttcgttgttcctgaatttgtgctcgacgatgacaggacacaaagtcaacgaggcgcaggtatggacatggaaaggcttatcgctagttggttgggaaaacccgtggaagaacaatctctgccagagacatggaagaaagtccaagatcaaatgactagtaggtggaaccagtacgtgaatatcaacgatgatccaggaattgaattagaaccatctcaacaactgtatgacaatttcgaggaggacgacaggaacgcaccatgggcattcaaaacaatatttgtgtgcataccaccagggggagggaaaaccaccttgaaaaatatggatcccgaaaattttattgatgtggatgacattagggaacacaaagattggaccacagtacctagtgccaacctatcacacatgttggctgttgacgcatccaaaaccaaggatagtttggaaaaaatgtgcaggggaaagtcggattatgggaagatcatattgtgccaccacccatctcaagtgcccaacaataaaagtgctgatgtcgttattagtgttcatacttggacgaccggaaaaatgcacgaggaaatggggaaaaatgatttggtgaacctaggaaagaaatacagcatgtataaacactcctccattgaggatttgcgtcagatgttgaaagacttcaaagtgagccaactaatggcggaaatcaacgagggcgacatacatgcaaacccagaacaacccatgttcccatcagcagtagcctattatgagagcatgtcctatagtgatatttatgaaataccacacccaaccgagggtactattaaaattaaaatgcctcaatacaagaagaaagaaacaagtcgggttgtgatggggaaatggccagcggagtataacagaccggtgttccatgataaagctgacgcaatatattgtgccacgtcaaagagattatggggagttcaaaaactgaggaaagtgaaacagaacaagcatgaagtgtttgagcggttcaagaaagcttatttcgtcggggatcaagaaagaatgctcaaagagtttgagactaacaaagtcgctataagtgacaaaggcaccggcgaatggattagaactcataaaaagatggagcaggtaatagcagaactgtacaaaatgtttaaagagagcggcaccaacaacctgttgaacatgttcaataaccacgtgaaggctgaatccctttacaaagaagatgtaattaaccactacagtgaaatagtcccaagacttattgtttggcatccgaaaatatttgccagtttgttttgccctgttatgaatgagcttaaaagaagattgaagatgctgttcaaaaccaacgtagtgtatactgatggattaacgcatcaaggcattgaagaaaaactagcgagattttcgccggattggaagcaatgggaaatggacttttctaagcaagataggcaaactgaccagaacgccatggaatttgagttccatttgtatgagaaattgggcatggatcaagagaccctggagctatggaaatcatgccatgccacatggataagcagatcctctcacaccaaagggaaaagagaatggatgaggaaaactggagatgcttcaactgctctcgggaacgccattaataattttagggcgatcctgcgattagcagaagacccaagatttagaggtgcattgatattgggagacgacagccacgtattttacgagggagaagattttgacctcaagtggatacagaggtccatagaaagggaaagtaacatgaaagccaccaaagaatccaatttgttaggctctttttgtcaacttatcgtttcatacatacccaacaaaggatggtcagtgtgtcccgacttaaaacgattgtacgagagattcactaacactaacaaagcaatgtgttttgatgaggaggaacatagagtacgagccgctagttacgtttacatgattggaaacaacgaaatgactcggaaaatttgccgtacgttgaaattggccacaccacccaatcgtagacattctctcgaggacctcatagcaaaaacatgtttgaaacgaggccttacgtatggtagcgtctcagaaatgactcggtatttgtttcaggagttagagaataacatgacgactgcttataaagccacattctttgtgcactcccgttag

SEQ ID NO: 1231 - DNA, 14871 bp, Morchella importuna endornavirus 2
  source 1..14871: mol_type = other DNA
atgatggaaatttggctgcaacacattaaggaccaagagcttaccgaaggcaatttcgaaacgattccagttgctgatctattagagatgttgaagaaagtttttggtaggatgaagcggaaagactatcgagccaagaagaagcaattcctcctcacagaaactggaaaatggcagcaccatttagaatggacttcaaacaccaaagatgaatacgccttcaacttgattgaactagccgatgagcttgaagctagcgcagaagattgggaagaagcgcatccacccccaccaccaccaccgccgccgaaagaaaaagtgatgagagaggagtacacagggccaacccaagttggtggctcttcagactgttggagcgcgttacccctgatgtggcaaggcgagccctggcatctcggaggtcatgttccaccaatgcgagatcaaacgctgaccatcgatgaagtgttggaggctttggaagcatcaaaacaagccaacattaccttctgctggccaacagacgaacccagatacactattgatttcgcagccttatacacgaagaaaaaggcttacaaattcactaggtcgcgaaaactagtgcacattgaaccttgtgttgaattcgacgggaaagtatccttagaattcatccacaaaacgctcaaagtgcttaaaaacttggaggaaaaagaaaacgctgataaacccgccgagacacctgaaaaattcgttattggattagatccagggttctttttggctaacagctttgtcgaaggacttagactcgcaacgggcgacgatggaagtgcacagtaccgtgaagcagtgaacaatcacgacgaccgcgttgtcaacaacacgttcgcgcgcatagagctgcaactagttaaaaccgtgaaaccgagtagcaacttgctgtctggtaattactcatcgatggagcgtacatctttcgtgacaagtgagcaaacagaacaaagtgcagacaaagagttcctgttggacgtttgcgcaacgtacgcttacaacaacgtggaccacgacgttaccacatacgacgatgccacagctgaaaggctcgacagacaaacctggtttgagcgcaaaaccatggatattcagccaacaactgctcaaagcacgtactacgtagcaattgaacccgaattcaaccgtgccatgatcaccgattttacggtaattatcgggccggaactcggtccagacaattctggcaagttcgggggtgcgttaggctggtaccaaacagtggagggactaacttactatagctttaacactgagtcaaaggggacacaagtcggatggtggcacgaatttctgcgtggcaacaatcactctacaatcaggggcgtaccgttcgactgcgtagcgagaaagtcattctacggaatgcaagtggttattatcacgaacttgaagtacaacttgctaacggtcatggagagcaatgaacacttcttcgacattcctgttgtggacacaacgttcctatctaacttcggattgccaaaaataattgtcagacgaatgcgattgaacaaagatctactcaacagattaatgacgaaaaatctaacgggtaaagtagggaaagacagcttgacggagtacggcatggctctcagctggtattcatacaacaaacgtggcgtagaactagccaactacaaaataacccccgaagacgtgaaaacccacgtttacgtcgcaatggtcttgcaggcgagagaatcattctacgatgctatttatgaacagttgctaaaccccggtttaccaaaggtattgtttgcggcgttcagctccacagccactgtggccatggacatgcttggcgatacaactaagaccattgacttcatgactaagattgaggactacattaaactgccaaacgtccgttcaatgatagggcacagcatggagaactggatgtctattgacgtttggtctcagagctcttcgattattggggtgaaattaaatgattattcaatttgcgcccaccacacaatgtgcttagaagcaatcaccgattatagatgcacttgttgcagagcacagacggctccaattgaaaatagccgctgtatatgctgtgcttataacccaaacccatgttatcacgaactaaatgatgagcacaaagacccagaatcaagcaacaagtgcaaatgctgcaaccgcagtagcagcgcatccctttgcattgactgtaggggaaacacggctgaatatatcacgttggagacaacagcagcagcgagcacgaaactgggcgtcacaaaacatcacagggcaaaaaaggaggtagtcaaaacgtcgacaaagccagacggggaaacagataaaccaacagaccagctgaaaacaacgcacactccgcacgatgattggattacacaacaaggttacacctggcatgacaagtttaagaaatttgtgcatgaagtggatgacaccaacgcttgcattgacctgaacgacacaggcaaccatcaacataggtgttggaaatgcaacacagtgtatgagcacagtcatgctcacaagtccactttacatccgcaattctttggtgattgtcccacttgtcccaaacgtccacctccggaaaaacgggaagaaaggaaaccaaccactatcagctacactcacgctcaattggctcaatccattccgtcaaatgcactagcaattctcactggcaggattaaattgaacgaactcgcacacgtagacgacgcacaccccttattgagtgcaattccatttatctgtgttggaacacccacaattccgaagaccatgttcaccatcagcgatgtacaagacgtaacaatttctgattgcggtttggattgcgtaaaaacctatattggaatagacttctcagaagtgcgcgcaatgaaaacaattaggaaattgaggggtttgggcgcaagcgacattcaaaaattgcttaaggattactcaatcaactcatgcatagtggatgcagcaggtgctcatttcagtaggtccaatgcttcggaaaattttgcagtaattgtacacggaacggcaattgataacgacaatgacaagtcacattggcagatatgcaaactccggtggaaagaagacgcaaaagtcgagtatttttgcgacccactatccactccccaaaaacaccacacggaagccgcaaacgtgtacaagtgcaagtactcagaactgtcaaatgatgagaagctagcattagcttttatgatgattgataagcacacagttgccataacatccgatctcgagacaccaaaggtacataacgggtacttgtataactccgaaacgcatgagatgaggaacggtcagtacaacttcaagctaaaagagaaacacgccgaaatggctaccgctatggttgaatgttttgaaaccggcgtcatgccagaaattctaactggggcttgggacatcgatctctccagcattttggacgtacaaacgcatgttgacatggccataagagatgaattacacaagatttgctcttttctcgctgaaccaactctgcatggcaccattacgtccaagtatctaacgacagacttaaagggtaaatcaaaattggacttgactgatacaaaactgaaaaacggcgacttgatcatgattagagaaggcacttctttcaagccgaaggtgctatctttgaaaagcggaatggttgacgtaaagtccaacgacaaaaccggtttcgcatcgattgacatagtagtgccaaaagccagtttcatgagctctataataaaactattcgcactaacaagatgcaacacgacagaatcagacctaatcaattcttacaagcacaagtcaacaagaatcactgttggagcaggcggaaccggaaagtccaccaacgtttcaacagaaattaagaaatggctggaaaaacaagacaaatttaccaaaccactggtaatagcctgtacatcgggaggcgttgacagtttaaggaaaaagttacctaaatcaatcatggtttactcacgagaaagagcgtcgtacatagagttacctgatcacgacgttgtgatatttgacgagtgcaccacaattttgccgtgggagctaggattgatcgttagcgctggtaagccaatgtggctgctcggagacccaacacagataagtgtgatcgacttctctagcggtggtggaggcaaggtgatgctaaatgctatccaggcaggcgaacgataccaaaaagtgaagaagctaacttctacataccgatacgggaaaacacttgttggaatgctgagccaacatccggcaatggcagacctagaaagtgtcgctcctcacgacacgaccgtcaatttgaaatggttggagaaatggaacaccgacgatatattggatttgatcggggatgctcaagtaatcctttgcttctataacgcacacgtcaagacgctaaccaaggccatgcagaaagcgaggaagtcgatcagaacgatcacgactgtgcacacataccaaggcttggacgcagacaaggtagcagttgtacaggcgccgttaagtgctaccgcagacacgcatttgtcatttggtcattgcgtatcggcagcgacacgatgtcgcaccagcctggtatggataactataaatgactacagcccttcaacgtcactagcgggtagactaggcactttcataggtgcaggccgtatgtcaaccggcgaggtgtacaccaacacgtctaaagttcctctactaatgaggaaaatagaagctaacaacagattacgcgacatacctgatggtgagccttatgttattgactccgttaggccgtttatggcatttgtaccacgtggctggcgagcatgtgcactaattagccccacggaacaacaattaggatcttatattctcagtacagacgtaagacagatacaactgtggtttgaatatgaatggggctgctgcacttggtcggccacacccatatcatccgaccccatgcacctacagttttcaactgcgtggaacagcaatcaactaatcgccacgcaaaagaatagattagacttaccactgttaaccgttggcgacgcagacgaactggtgcgactgtcacaaaatgagaactggtcgttgaacgtcaatgggatagctaacaatttcttcgtggagagattgtgtttagcaggtttgttgcagccacacatggtcgtgatccgagcaggaaagctgtgctcgggtagtgcacaatcctacgagtatgctccgatctacgaagaaagatcggtagagattgacacaaacgatgaaatattaactccatcgcttgagaagcggcagccagaactatacaacagcgtaaccagcgcatctatgagctcaaagaatttcgtgtttggggtagggaaatattttgaaattctaagtagtggcggaaagaatgaggcgtccaaaccaccaagcaacaacgatcttgcagaagcgatcaacatcgtaacacaaacaactgaggcgggaaccaccactgttgaccatgaaacagctgagattgtgaacaaaattaacatggaactacccgatcccgatacaaacttaacggactttaacccgggattgtttatgcggacacttcaatgctttcctggaaccagcgttgtaacagtgactactgagcaaaatgaaaatggtgcagttgaaggtattaatttaaaagtcatcggactcaatgcacgaattaactttaacttggaaacgaatgaactagaattcacaaatgtgccaaccaaatacgttaaatcattaacgacgttaataaggcattgcagcaccggcgtggacgtggaaaattgcggaccggctatgaccaatctacttgagatcggctggtggagaattcgaatcatcgcatacgtggctaaagtgtaccatgcaaataaaatggcacttgttttaacgggtaggcttgaagggtggactgtggagaccatcgggacctgttgcgccgcctgtgctggagtaaaattcaccaacggaaaccacatcgtagttgtgacgaaagattatatgacagccgccgctaggacggtggtgggtgagcaatgtatgacgatagccgatgcattaaaccaagtaccaacatgggactaccttgatcctgagctcgacaacaaagcttacagtcatgcaattttaactgaaagaatttccaccgcccttaaagacatcccacacggattgacgggcttccaaaattggatgtggtataacaaatctgacaacgttttgctacgcactgagataaaacagactttaaacaaagacatagaaataactaattatgatgatatgagcttgtacccattctttggtaccaacgcaacggctctgaatgtttggaacgctatgaacaccaaactcggtgccacttccttgctagctaccgtaccggtgagttgccatacaggcgggaaacggcaggtaatacaagtactacctcccattaacttgcaaggatatataaacgttgctctcaaccacctgtatgacatgtttagagatgacgctacggccaggctaattgccaagaaatacatgggaaagattggagctaaggaaatcgagaggctgccagggatggcggaatcgattgcttggcacaaagctaggaataccgcgacatacagaaacatagtcagtagattgtcaaagcaagaaattaaagccctaaaggatgaacgaaaaattgcgttcgttccgacggaatgtaagatagtactggacaagtatgagatgggtgcttcaattgcatgcaataaccgaaacacggtatgcgatggagcaagcagcgcatttgacgtctacacctgtggtcttgttagccacaagaacaaacaaattcaattaatgggttcaaccatttacgcagcctatactatacaagacaaacaagtaaaatcatggtaccacccaactgacgattggtctatgttgcaatttagactagacacaccattatatcgtgatatgatcaaactacacaactcaaggttggggtttgaggacccagaatatcagttaaacgatgctgaattgaggggcgggaaggtatggacgggaatgcatgatgatttcaccacagtaacagttgtttccaacccatacatgctatcatactcagggtcagagttagaagaaaaatacaactcttgcgctcgaataattatgtgggctccgcgggaagtgcatgaacaatctggcattcgttttgtacgggtgccgaattcgcagaaaatctttacggttcacaaagaccaagctcaagcaatcgacagcgggaagatggttaaaggaacatcgctcaaatggcatgtacttagcagccacggaccaatagtaatttacgaactaacgaatgacccagtatggtttgaaccagcatactactcacaaaggacgataataatagatacgccaactttcttgattgatccaacagaaatattgaaacaaagaagtttcgttaaaacgaaagcaattgcatacaacttagacatggtttccaacctgcgtaggagactattgcgtcccggcactgattgggatgacttgctcgtacaagctagaacactcgttaatgtagcgcagtttggcacccacacagtatcagcaaggtacagaacaaatgtagctgaagcaaaaatggcatgcagactggcttggatgactcaccaaatggaagaaactcaattttcactgttgggaatggacggggataatttggtgagaccaaaagaaatggctgctttggcgttgggcaaactcactgaaaaactatttccagatgttgatgaaaccgacctagcaaaagctatcaatgagtttctgcaaattgacaaagccaagtgtttaatttacaacttctttaactgtttgaataaattgaaactcaaaattgatgaagggaagcgcagggtgctcagcggtgatgatgttccatggcaaccaacggacagaaatttctggagtaacaagccatcagcgttcgaaaaagttgctttcaatgagactgacgacgacataaccatttacgttcactgtccacactgtgctaacccaagtcaccgagccgcggcagaagtgctaagtgaaggaaagattaacttttcaacacaccaaaaggccatcggacaatacttaataacatcagaatgtacgcacaaccagcgtgatggaatcaagattcagtggcatgggtacagctctggaaaattggacgggaaaacagtattgtggtcatcggaacaccgaagaattaacacaaccgtaaaaatagccgttgaagacaatcatctcataatagaagacgaagtgctgaacctaccggctgacttaaatgttatcggcatcaactcttacccaatcatttctaactgcattgttaacgtagaaagcatcactgcggaagtcgaactgctgcttggcaactgctactcctgttccatcacgtatccatgcaaattagacgccgggtttgactttggaaagagggcgaacaatgttcaattctacaaggaaggtgacaggacagtgagaattattgacgaagccattgcagacgcaagtgacgacgaggaaatggtcgcaataactaaaaagattgacacgacagaatcattattccctgaagtggacgtagctaacttccttgaactatcaaaaaatttcacttacgaggaaacttctggtgcgggtatgagatgcggtgctaacgcttacgcacaatgcttcaacctagacccagatgacgttaacgtaatgctcgagacgataactcatgaagaaggcaacttcgaagtaacagcgctgttgcaactggccgagatagaagaaagggctttagctatttacgttagaggagaaggtgttgctttcacaacaaggtgtgaaatatcagagtcgatgaaagttataatccacaacgtaaaccattactccagtgtcaacctttgtggcagccatgatattccaacagcgctcatattcacaaatggagaaaaaattgatagaaatgcgatgaaagtgccatgtcaccatgatgaacagactgttacacatgacaacctacgcctaattgatacactactggaggatgcgaaattggaatcaataaccaagcggaaaagaacgagagtggagcaaccaagagaaagttatgagccagacacgaaaataaaaacggagaaacaaccctttaaaagaaccgttcaagaacgcacgcgagagacacgtcaacagaaaccggtaggagatccagaatacgaatttttcaacaaaatgatgaagatcgacgacggcgcgagaccgacactgtcaaatgctttaatccaggctctcaaagacaacaaaaatgatagagttccaatatatacaaatcccggtgtaggtctagttaataagcgtttcagcttaggaagaaatatgctacacactgacagtactcattttgtggatagagtgtatagaaacggagctagagtgacaaattggatggcactatggttgagcgaattcgaagcgcgcatcgcgacactaaacccaaaacctgacgatatttggtacgtgtattctttgagagacggattcgccactagaagccccagtgtgggaaaaggaagacatataaacataggccaacatagtgagaaaatgcggtcactaggatacgaaacgcttgaactcgatgaagaaccaggcagatttggggcttgcctacgcgttatttttgcaatgttgctaccatgctacaagaaagtttactttcggtccggaagaccaggtttgcacgtgttatgggctgaacatatgcaaacgagaattgagtgcaccgaaaaccacgtgatcatacccacaaacaccttcggtccgtttatcgacggaatatgcatcactaaacctctgtcagttacttcgattgctaaattcttagcatcgaacatgaactaccatgcaatatacggaattgatgagtgtgattactcatggttcgaaattaaggtttgttacttcgcacccgaaagcaagtatgcttattcaaactacaacttaaacccacggtacgccgaaatcgttaaagaaattacaatgattcccgttgacacggcaaataaagaaaataacttaaaggatataccgtttgaaatgatacaattgtcgttcacatcaatagcaacaacttggccagttgctctgtatcttgatcctgaattgccgttagtgtccagagagggtgccaaaccaaaagacagcaagttagtcactgagtggctagcatgcaggaacaacatcgacggaacaccgtcaggtgaagagtggaaaacggggagcttgctgcccaggatggtgattaataataattacactccaaagagcccactgattcaacacgtaaaaatggggaaaaccaacgttttattttcaagcgatacaaacaaatactgcgttagaaacgcactgtactattgcttgcacaggcgagccgcaatcaaatcgcacgagttcacatacaacatcaacctaatccagaacatttgcaaatttaaaccctttcaaacccaagctgaaactataagcatgtggacgatgctgggattgaacgtttgtttgaccgggggacagccagaacttgctgtaaccgtaaatgacggacctgttgactatttaagtattagggttgacataatgggaaaccaacatatgaccgtggtggaagaaggagacgttgacgtcggaggtgagtactcagcgacggaggtgagactcgaaggcgaacttatcacgactggtgagatgaatcaccaaattagtgaattttggatcctaagcgagtatttgatgacgagcgtcgacttgcataagtacgagtacatcactaggaaccaagatctcaacgaaaggttagtcaacgctagacagaggatgcggggcaggtatgacgtcaccgtggctaacacgggtggtgctcactggaaagaccacgtggtcaaagccaccatcggagaacaatcggatagacaattcttcataaacaactcattagtaccaggcagaacgtacatgttcagggctgcgcacggaatggttgcaagggttgctggcaaattgggaaacaatgtactaattccaagcggcgactttattccgaacgtgtacattgacatcgctgcatctgtggataaaaagaaaccaacaaagttaccaaagagaacactacgttctggcgcaaaaatgggattctttaaagctagtgagaagcactgggcaattgccaattatccgacttgggccaattacccggtaatggatgaaccagacgtgttgttgctcgtagattttgacaacatggaccatcatggaagaccatatcgtacgaggatgctagacatacccccgggaaatataagaattccaaacgaaatagacatcgaggaaatcaccctattacgactgggcggcccactcaggctgggagtaaaagccggtgaatggtatgtgagcactgttgtcgagagcagatggacagaagaagatttagtcaaagtggtgaaaaaactggacagacaatacagtccgacaaaaatcgtaaaaatgtggtccgccgtgaaatgggaacacgcaacgtggcgagatgagcaagggaaagaaacagtcggcaaccgcttgcagccactaaaacaaaaactcactattaacttgttgcatataaggaacgaaccacttactgatgagagcttgaggataataaacaataatgcttttgaaggcattgacgtaactggcgatgaattgacaagagccataataacttggtttccaaacttggactgtgagccgattgtcaaagagggtaaatatagagtcagaattcttccttttaatggagtactaggtgaaacagtgttaagtggaaaagaattacacgacccccactctttcacaacagtcacatttgaactaatcggattcggcagagacaagccggacaagttcatcacggtcaaagcttcaagttcatcgccggttgaatcactagacgaaatgaaagaaagaaaccacctgggcataaaagaatactgtctgcaacctacactagctcaacacctggtgatagtaggtgagttcggactgaatccgaatgaaaccaagaaatcagaaattgttaaatcactgtgtaaatactcaggcgtggatgaagaagcattctacggactaaccagcaggtgggcaataaatccaccacaaggttggcgaaaagctgcaattgtggcagattctagagatacgcagcatattttgaccaaccacccacatattggtttggcattcgagtacggatggggaacatggacaataaacaaaggattttcgtttgaaggaaaaccgataaccaaaaatagaacatcatacactactattagttcaaggaaaatcgaggactatcacctaggattcatcgatgtaaccaagttcatcaaaggaacagccgacagcgtattatcaatcgtaaatgcattgaacggaacgaggcacttcgagcaattcaaagcccattgtcaagtttcgatgcgaccgacttacacttgctggcacatttggaaaatagttcacagtgtctgcaaaatcgagaacgacacgatgtgttttagcgccaccgaaggtggatttgatcactcacatgaaattggggacaactcacagtgggaacaaagtctcaacgacctcgaatcgagggcggaaacgacgtgtgtattacgaagtcgtcaagtgagatccatggtgtactttgttgaccctgagtatgacgaggaatggataaacgatgatttaccagtgcgaataacgatcaagccaagggtttctgacttggtcagggaaaactttgactgggtctcaagatcgtatgggtccatcacaactcttgacgggtggacgttagagttctcacctgtggggttcggtcgtgataacaactcaacggacgtggacaaccaaattcgcatagacgacataaaaactaagggcgtggcgaaatatcaatattgggccaaagagattgaagtgacgatgaagaatgaaatgcctgacatagtcttaaacatgacaaaagaacaagaaagcgccattagaactaccaatgttataaatgagttgacatacgtggattgggataaagaaatcgtggagacgaaatacaacgcaggcaatgtatttgtagtaggaaacggaacgatgactagcccaaccaatgatgacgtagtggaagagatggtccccccgtcagttatcaattactgggatgatgaaaccgcaatgattgacggagtgattaatttacctaagagaaacataaaaatgaaagtaaaccctgaatttacaggtttaaaagaggtgagcaaagctaccatgacaaagtatccaacacacgctttgccgggctataacgtaagaatgaacgctggagcacaagcagtagccgaactgttcgggacacacttgtcactaaggacagtcgaacatgatccagagacagacgctaggcaattcatgagcatatacacacatcatggcgcagtggctgcactagagcaggtgaacatcgagccagatgaaattattgagtggcttaaagaacgaccggacaatctgaaaataactaaagaagtagaccagatattggcagacggcttggacatcactggcttagacaaagtcaatgtacacatgaagctggagtcaagactgaaggacgtgttgtgtgccgatcataaggacgccaatggcatgccccttaccatcgaagagcaaagaattagattaatcgtatggcagaaaaaaggaatcacggccctattcgctccggttttcaaaaaggttaaagaaaacttaaaaagatgcatgaagcaaaacgtggtttacactgacggcatgacacccatgcagatcagtgctttgctgaacaatattcaagctacaggcgtcacattcgccgaggacgactgtaagaagcaagacaggcaaactgataaaactcttattagaactgaaatgcagatatacaagaaactgggtgccaatccaagtgttataacaatgtgggccactgttcacgaccattggagagcgaaaggtatcggtatcaaattcgttggtgacgcgtctagacatactggacaagcaacgacagcaattgggaacgcaatagttaatttgttggtccacatgcgattcgtcaaaaagatggacaccaacatgaaaatgatgttgattctgggtgatgacaacataatggtgacaactggagcgattacggagaaagacatatcactcaatagtgccagacactttaacatggtatctgaaccattcgttcacgagagatacggcacatttctcagaaatatggtgtacaaaaacagcaataatcaaattgagttgggaccggacttcgtgaggttaagacggaaatttgaggttctaaatggcgtttccgaagccaacgatgaaaacataatgatgcgaagtatgagttacgctataatgatgggtgcaatacccagactactatcggtggtggaatcaaagggatggcccattaaattggagatgtggtatgagtaccactcggtgatcaaagccaccgcggaaaaatatggcactacggaagctcatattgagtcgcacgtgaacaaattgatcaacatgataagggatcagacgttaatcactagaacaaagttaatgttcaccgaaaaaggacattaa

SEQ ID NO: 1232 - DNA, 14205 bp, Morchella importuna endornavirus 3
  source 1..14205: mol_type = other DNA
atgtccaacaccaacaacaacacccaagttcccaacaccatgaccaacgcatccatttatccgaataagtttggtagttctttagaaaactacccgtgtgtgtctgatacaacacacacgacaaataacgataatataaatatcgctgagcacatgctcgccgttgtatcaggcaagctaagctcagagaaatccactcaagctaacctttggttagctgatgtgacatcagggaaaaaaactctgatgagaaacatgctgatgaatcaggcacctgaactgcaaggcgtacaacttactgtgtgtgatgacaacaccagtaaaacactttatgaaattgtggttgggttgtatagagaacttagtttcaagttaactcctcataacttagctagtggtagctgtaactccctgacccttagacagccaagagttaaaaagataacagtgttgaggtctgaagatgtggcggaagctgacactagtgagccagttattgggtggcctggagactgttggcgggtgctgttaccacagaaaactgaggctcctagcttaataaccccatctcagctatgggaattgctagctgacacagtagcatggttcaggaaaggaaaaaccttcaacatgtggatcaagtacgaaaagcatgggaaaaactatcacattttgagctgtcaggatgcaccctttagaatcccaattttcgacatacctgaaggttatgagccattgaccgttattgagacatggtgtaaaccacaagcccaagctgagtctataccggttgaggtatcagcctatgagcttgattctgggatcgaattggactacgatatctctgatctttgggaagcagaatatctgacacgttgcagcgaaacgttaaaagggaatgatccagacatggaagaaggccttgttggtgctagggattacatagagaatgttctccaaggcctcggcataaatccagcatcagttaagcgtaacgcaaacattgaagcactgattaacagtaccaatgaacgactgttggaacccgcactacggccgactgggaaaaggcagttagaagtcagcacttcattggacagtactgtatgtgaacaattgcgtacagactggccagaaacagagttagttatggtacgtaaggccaccaacccacacacgtatttagcagctagccgcactgccatcacaaggtggttagtttcaataatgcccaaacacactgcgttgtttgacattggaggtgactttgccttgcatgttgatgatggtgacttgcatgtgcacagttgttacaagcatgctagcccacaggaccaagcgcgttacattaatttgaccggaagggctaaaaccctgctgctcaagaaattagcgaagaactcagctgctgatcaagaacaagctgatagggcatccatcccaaatgtgctcaataacctatcgcctgaaaacctatcttggtgcgacaaagcagcagaagactgccttttacagccggttgatcaatactcgtatggcatgtcagttgacacactctattacattaaaccaattgacctgttaaagatttatgcccacaaaagaattgtcaagtgcactcacgccattaccttgcccaaagactataaatacaaaaatgagggagccctaccgtttaatgaaggtacatggcacaaggtcaatgggaagttaatcatgacaatgactggcttgtcacaatcttatattaatgatttggagaccattgatttctacttgaacaaccctgtcattgttgcagacaattttatggtgtattgtaaggttgagggaagacgtggcccatatatgattgtagaacactacgtgatggcccgccatttcttgcacagtgactcaatgttacacactgtttggcaaaccactgacgataatgtggtaatgttgttccctgtcatagatatacataaaccagtatcattgttgatgagggaaccgtttgttatgcaaccaacagtgttcaacaggtttttcctagaaaaattactaaataggttgatgatgccttatacatgggaccaattgacagcttatgcgagcgggctgatcgggcgccactatgtcagtgcttcaggagtcacccaaacttgggatcaaaccacattcactaatgatatcgtgatcaagcattgcacttgggcatactggtataaaagtgatttgactgagtctatcatgcccttgattaaaaaagctgataatactacgcataaaacgttgtggtgggagcaagcttggaaagccatgaaaactttcttgatggaattagggcgacaatttgacccaacagacaatgaacttgtaaatgagttcatatcaacttattcagaagacacctcacacatccgagccctgtggatgcagctgggcatggccaagtcagcgtacaacactgtgcttgagctgggagctaatgtgagtttggttgatgtaattgccgttcaatacaacatcaaaacagatcaagttccagatgtcgctggaagcttgctagttaaagaccgcagtgtgaagcgaaacgtaatgagtttattgacagagtcagcaaacaacactataacactgcagtgcaacaagttaagccactgcccccatgaccacaatgaggcacacacacacatctacatatcccacacaaacaccatccacaactgcaattgctgtggcatcaactcaacgctgttcaatggttggtgtacattatgcctacagcactacccctgcactggaaaaaatcaaacttgcttgcatgaacataagttgaaaaatgacgaatgttgtgggctaagccattgtaagtgtaagaaagacgttaggtgtatctgctgtggacatttgagtctttccacactgtgcagggtgtgtatagatgagaacgaggatgaaaaaaacagctcggaaacgagtgagtcatctgatgatgacattgaaactagctcgagctcaaatgactcagtctttgctggaaaggaaaagatgcctaagaaagggactgaaaataaaaagaaaagtaagaaaaatgaaagcaaagagaaaaagaaagaaggaggtccagccaaagaaggtgacactgatgctaaagacaacaccatgacaggagtgaaaagccctgaagtgaagccagacgtgacagaagttgaagcacccggtcaagataaaggaacagatgtggaaaaggaaatggatcaacctgctgatgatacagacatagaagagtatgattacatgccagtaaatggcaagttcaactttaagggggtggtaacaaaggcctactgcgagcaaaatgttgctatacccacatacgcctacaatcacttgcataaatgcctttggtgtcataaagtatatcaacatgaacacttttacacacaaacaaagcattaccaagcagtgtacgattgtccaaattgttatgcagagacaaacataccagctacattgatcgaggacagtttcgcaccagatgatgctgaatttatttcaagaacctcagttgcaactccactgtttgctaacaccctgttagggaaagaagaaaaatacaccatttggcccactgctcacagtctcaaagctagtgcgccatctgtgtggcgtgagtgtttagaataccaagcttatatcacgtttcaagagcatggcagcttgaccattcctgacccagccttgggaatgatagaaatgttaggggaaaagagagagagacaggcaagacttaactgggctgatgatttatctgagagcagtggtgattccaaggggaacaagggagaggttcgtgttgaagcaccacaggccaagcaacccgaagagaccaacacacaagaactggacgcaccacgtgacatagacaatgaagagtccaccaaagttgataagggtaaaggtgttgacaccagcccgagcgataaaacttttagcagtctgcacatacaacacatgcccctaatagacagaaacaaaccctcttatgagcctatgcaagtaccacaacaagaattttttcataccctggatttctccgctatcgtaataaattatggtgaggccgacggagatggattctgtggggctcactctttagcccaattatggaagatggatagtgggttaatctgccaaaatcttaaatacatgactgacagaccagattggtggactgctgacgaattgggtgcttatgcaatagtgatgggcaagaatttagctgtcacatcaggcttttgctctagactgtactgtggaaacagcaagtcatgggaatacgactgcattactagcttaagtgagatcacaggagattcacattgggtgccggcaaatttgcgctatgcgtatttggccaattggaagttacaatcactagtagagttcaacagtaagattgcagcagtagcttcagcaatagaacgcggtgaagatccagaggaagttgcgagatatgatgacaggaaactactgaccgcgcaatggactttaggaggagctaattgcgcattccactttaatcaaagtcaggtatacgaaacatggaaaacatttcctggtaagtttattgatggtaggatagtccacacatcaaagtcatttaaaggaaagaaattgacagactacactttaaaacggccaagtggacttcgcttatgctacgcaccaaccggcatgggaaagaccactagaatatgggaagtggtgcaatccaagaagatcctgttaatcaccccttcagttgctactgttaaaggtgcagtcagccacatgacaaacatcatgaagaagaccaaaggcagcaaagcgatgacggtggttggaagagcacaagagaaatggtggccagcaggaaagacagcgcaagatgcagcgaatgcaaatgtgttagttatgacagtcaacgctgcgtatgctagatattgccaagataaagtgcaagctagtgtcttaaatctgataaaagacaggtttgttgtattagatgaattgcacatgatgactccgaattattacgcactgtgcagggtgctgggtaaccatgttaaacttgtgatgacagccactccccatggtgtgactgcttcttcagacactgcgtaccctgtaacaacgattatatcagatcaacccctcgcaacttacttggacgatagtccaccagtagacggcacattcattgtgtgcaaaagtgagagagaagctgatgacgacacgcttagcttaagaaatgaggtgcgtgacgagaacaaaccactgtaccaaacaatagtgagcaaaaccttgccgcatataaacttggacacagtgcatggtggaggtgtgactgagtgtgtgactacaggtgcaaccttgccccttgcaagggtgtgggtggataaaggcgtgcgttgggacatgtattacacttgtcagcctgccaatgagggtatgccctacatattcagtaaagatagggatgacaatacagtcacacagattaacaaaaatacaacgctagcatacacagccaaacgctgtatacgcatgcaactgcaagatgctgatcaaatcaacgtcggtgtatctgagattatacagtcaaggggtcgtgtgggtaggactgctgaaggtaccgcctatatgccatatgtgagctcaggcaggataggcaatcctggtgaaatcattgattactgcctcaaaggtgggttacccataccagagtgccttagggaacaatttgaaaagttaaaaaatttcaagaaaatcaatattgacaatgtcaagagagcatgtgagatagccataaaattaggttacccagatgaaacccaccagatggtgagtgatgcacagtcatggaatgactggagggttgagctagaacccctgctgaaaaatgcagtgttcacagcagacgagtatggcatggattttgtaatgtctaaagtatatgagtgcttggaacaaccatcgctattgatagctgctgacaagcaaatggtgaagaaagccagccaaataaaccaagggccatctactggtgaggcaagtggtttaagtaggttggcagtatccaagtcacatataaagtcaaccgtggtctcttttgtgcaaccaaccttcgtatgctattgcggcaaggctgcagatttggtggtggcatgttcacagtgtgtcttcatgctacctagaaccaccaccaacatcgctccaacattgaaacagtggaattttactgagcccttgcgcgctaaagaatcaatgattgttgcgatggggcagagcgccagcaagcaacacaataaagacatatcgcaagcgctaatgaacacatttgcgtcttcatataatgccatatattaccgagtgcgaaggaatataactgatggtgtgagcaagtttgccgacagcgtgtacactagtgaattcaccaatactaaagcacctgagttcccgtcactaaaaaaattgaacgatggcgaaattggaattgtatatgtgcccagaacaaaacacgcacacatcgtgttgtataaatcaggcagttgggtgggcatgccaaatgttttatcggggcaactttcagtgcacatgcacaacaacaaccacattttgggcatggcatgtatggtagacaacatggagccaatcgacccatccagatgcaggtcagtgatagcaaattcccaaatctggataggcggggcagggactggaaaaacaactcaaatgttaaaagaaactgcatctgagagtctaccagtagtgtccaaacaatctttaatgttgaacactgtcttgaagcagcggggtgagacgccaatatcgtatctgatcagagccaacaaacctaaatcagtgtgcattgatgagatcgggatgttcgacacaatagagttaattgtgatggcgcaattcgtggataaaatgtaccttgcaggcgacttgaaccaaaagaccccacatggcgagtacttgtcaacaaaagcagatatcgcaatggcagacctactcaaggaaataccagaaagcagcaagcatgatttgttgacagtgtacaggtacggtgaaccaactggaaaggtgattaaaagattcatgaacccaaaaaccacattcaaagggttagatgacgggggaattgagttccaccaaatgtttgacacaactgctaaagccatacaagataaaatagtaaatcacaagatggaattggctgtaacccacaccaatagttatgcaaacgccatcattgagcaagccgcacacacagcattggaagttacaacaaccggtcgggcacaagggtatgaagcagacaatgtagcatattttgcttgttgcaccgccctgaaagcatatgatgcaagtgagttgtacgtggcaatgacaaggcacaagaagaaacttaatgtgttttatgacaaccgagggtacatggctctgtcaagactactagaaaagtcattcattcccagccgtaatggaaataacaatagggatgactacacattggttgaaaaattgctaatggtactcaatgaaattgtcctagtgggaaaacagacattccaaaggatgtttgcagcattaacagaaaaagccaaaagattcatcaaaagaatcctagtggtgttaagcagagccaagcccacaggatcagaaaggaatgcgcaccctgggtttgacctttaccattggttgttgtttgccagcaacaagttggaagcagcctgcgcaaaagcatgtgaatgggttgatgaatattacaagtccgccagtgagtcaatcaaggccaaatacaaaaaattgatcgcaggtgactcactggttgtagccgcggacggtcaatctgttgattcagaagcagaaaacattgtggatgtaggcttagttggctccatggcacgcatgcatcatgtggcctcatgcatagacccaatcgcaagttcagcagaaagcgtaagacgcaggacgatgacagtaatcaccactcgttggttaaaaaacactgataacatttcaagaaggatgtacaacaggttaaccacgaataaccaaatgtcagatgatgtacaagggtgtgtgaatgctttggttgcaatcgcatataatgaagggattacggaactggaccaatttgactatgttcacacaaatatagcgtcaacaagtcaccgagcaacagccactatatacacggttcatgtgagtgaagatttccacgatgctaattgggcaatagaaacattgacatcggatttcgagtggactattgtggagcatggcactaaaaactcatttgtccgtaggcatggtgccaacacaacagggcgccagctgaatgaacccccaaggagcacgttaatttgggaacatgatttagttgacgtcagtctagataatgacagcccagaaggcaatcaagaaatgataaacatgccaagagataggttgctcatattgaaagagactttgcattgtatgttggattgggtgaaacatcacatgcccaaactttgggatgatgaaaaaaaacaatacacatttggcacgccagaaaaccgccggctctttgctagattgaaacttgaggaagggttatattgcagtgaagatgaagacagtttggaggagttgttacaggatgagccatgggtgccatatcttaagcacaatgtgaaagaaggcatgatgctatttaaggaaaccatgctaaacgtgttgcggggagtaccacacctatggaagctcatcagaccatggttgtataaacaaatcaacaaaatgcgaaaccatgttgctagtgtgagtcttaataagttgaagatcaagaacaagctgcaagcagtaatatcaaaaacaggacaattcttgatagagagttttgaagctatgttggacggttacacaaccgtaggctacgtgtttgccgacaacattttaggtcaagtgtggctcaattcaatggctcgggatgaaccagtcatcttagctggttgggtaatgactattgtcttaaacccagtgctgagagaccggtgtggattgacaaacctaagccaagctatgcgagaaatttcaaacttaaacacaaatgtaccaagactaactattccagttatcgcagaagaggtacaagatgcttgggaatttgcgttggcctacttggaattaaatggggtttttgtagattcaacaacgtacgacgggaaatcaatcttgtttgcattgccggctcctgatagctttgaattttgcaggcctgcggtgttcaatccaaacaattacgaggtcaaatcaggatttggaactgtggctagccgtgaattcgcagtgtcaccgattggcaaccaataccagatacgtggtataaatatgcacatccgccgaatgggctgcatcaatgaccccatagacatgttcaccaagatcatggaaacatgggaaggtaataaaacagcgtttgttgaacaaacccgggcagtctgcccaggttatgataacgactaccaaccagacacatcacctttcagaaaattgttttgtgaattaggtactgttgtgatagaaacagtacacacattagggaaagttatgatcaacatcagcagtgcaactttgctgaaattaagtcatgctgttgctagcggcttgcaatacctggcaaggaggattgaagagtggaacaatctacccgatgatgcgttggagaatagcatcgagacgttgtttggagcagcgaaaattaaaatagctgcattttctgacagaataccaaaggaatttacacactcgacaaacacaactggaaccagggcaggtgccaatgacgatgatgattgcaccgaatttatcacgaaacgtgtcgagtccatgggtaatgctgcaatggtaaaggtcaatgaaatattagacaatttcacatgctgtacgagtgaagcaaattacaatgactggttgaagagaacattccctgacacttatgaccaagaaatagagttcgctttaaagcagcgtggctcattcaattacacaatgaagcgcgtcatagctgtggttaaggagaggctaacaaaggctgggatagaggtttgtgacaacttgctgaaacccactcaattgttgtgcacctacttgcagcagaattacccaaacatgtacaaaaatattgagttcagccagatttgcgttgtgacaaaatcagcattcaataaactgtatgagcagctggtggacttagaacttgtgccaactactctgttgcaaaaaattggtatctatgctattgggatggcaagcataacagtagatgtttgtgagactgcactgacagtgatgaaaattaccaaaagaaaagttgagcagaaagctgttgactgctttgaatcaatccaaacttacttggaggagagagtaacacaggccaatgtggatgactcaagggcatttatcaatgagtggtacaacaaactcgatgcagaatcaaagaaaatagcaacatatgaggactacgtgagagagtttattgacagcaaattttctaagccctttaaagccattcaggaacaatttgctgaggctgcaaaacgtgacctagatgaagaaattgagaaattaaatgaaacatctaggaaattattgccaccaatgatacacgacaacgcctcagagtactacagtgctataagtgatgctggtaatgtggaaggtgtggggctgatagataaaacaaatccgttaatgagtcccgtgtcagggtatgacgatgtgattaacaaaatgcttgatgatcatggtttagagcccgcagggcacatcaatgcaaacccagccaccgataaattgcatgagaacagccaccttgtagcttatgtgacaaaagtgatggaagaaatgatagaatgggaagacattgatcaagtgaaaccaacccggaagtcaagggaaatgatacaacacttgttaaacagggtgtttccaacatctggttctacaatcaacaacagcataacacacgattctattaggcaatcaaaatcaggctggttcgcctcaatagacaatagcaaaccaaatgtgactagtttcaaatttcccctagtgccagaagccagaatgatgttcctgaccaagactcatgcggtactaaccattgacaaggtagcggtgtacatcgtctcaaaaggaaaacaatgcacaatgtattggagtgacaccaacttgatgagaaatgacaagttgatatcaaaagcacatggaatgctggccaaatttgctggtagcaatgatgtaatagtaaagactatgcaatacgtgctacgtgaggctgaaaaatttttgagagtgatgcgtgatgaggtggtgtggagagtcaaagcagccactggactaattcattttgaggagcacgaagttgacatgtcagtgagaacgttgtacctggcaatgttaagtgaccttaagatgattggatggtcgaaattgaacaaagggaaaattactagataccgaaaccacattttctttgaccgcagatcaaaaaacaggatactagattgccacacacacatccatgttgaaaagataagcagggagaaaagcagggtcaaaatttacagtggtaaagcggagacatttaacctgatgttaatggcaagcccgtggctgcaaatggtgacagccactagagacatgccacttgatgagcattcgttggacttcacgaacatcgctggacacttgcgtactcacagcacccccgtaagtgaaaacattgagcaatttaggcaacagttccaatttgaaaaccaacgagctggggacagaataatggacaatttcgcaaagtttggcattcataaagatgtcaacagcatattggacttgatcaactcacaaactgtagcagatgtgtatgctgccctacattccagccccctgtttgcacagctaaacgtaaccatggaaaataatttcatgcagacgaagactgatgccctgaaggaagaaatactgtcagaaatgatggccaatgagggttacagccatgtggagaaggcaggaaaagtgttgatcatattaatggcatccggaactggtaagacaacgctaaaaaataattggcaaagtttgggtctaaacgaaatctgtgaagtgtacgatgtggatgacggcttaacaggcttagaagacatagcgcagttgccatggcatagcaaagccttcctcccctcatacagaagttatgtcggcaaagtaattgaaaacgcaaaattagatagaaaatccgttgttttgttgtgccactacccagaacaagttcctgactttgacaaatacgctagtttggtcgtccacagaactgatgtggacaacttggcgattaggccgtggtcaatggaaaatcatgcgatgttgaatatggttgatgggccacgttgcacccacgtaacagtagattctttttcgaagcagaacatttgcatcatcaatggtattaaatcgagtatgtcccacttttccgtgaatgtgtcgacagacatagacatggcaccattgcaagtacaatatggtacggagttctacgaaaccggtgacagagggccagaaacagtgtggatgttgcccagtgaagggaaaatcatgtcatcagaaacaatgtttgttccagcacataaacaagtgactttagtaggaggaccaactgaaataaatagaccaaccatcagtggagttgctagcgcgtgttttaatgcactggcaaccaggctacatgggatcatgcccttgagaaaggtacaaattgagccactcgaatatgtcgaaaatataaagagtttgttcattaaaggctgtgatgaacacatgaagagatttcaagctgacccaatcacaccctctgcggaaatggtaatggactggctggtaaacaaggggcacaggttagaactactatcagacatggtagcgaacagtgtaaattatgacaaagcgactgattataccagactgtctgcccattacaaggttgagaacttgatgaaggaaaaagtggatgagttggatgaccaaatcggcagattaattgtgtggaacaatcaaaatataaacatgttcatatgtggcgtcataaatgaggcaaagaaaaggttcaaggctttgttgaacaaagagttaatcacatatgctgacggtctagacatggtaatgattaacaacaaattgaagaaagtcaaaaaatccacttacatgttagaaatggacctgtcaaagcaagacaggcaaactgacaaaccaataactgaagcggaacatgatctgttgttgcaacttggagtgagccccgaggttgtggcatacatgagacagatctgtgatggatttcagttgcaaacttccgacaaatttaaaagtagacgacctgctatgaggctaactggcggcgcaatgacagctctgggaaatgtcataagaaacttgttaataatggctgacatcaatgagaagtatgatgtgaaccatatatttgtgctgggtgatgatagtctgatcttgacagacgatgaagtgtcagaagattggctgcagatgacgtgcaagcaaaggcacaatgtgattgccactattaatgtaagtgaaaaaactggtgtattcttgcagctgttaatcggttacataccagatcttggctacgttgctagtcacaatttttcaaggttgagggaaagaatgagcgtaatgtcatacgagtatggttcagaagaaagcatagccaagtttgcaagctacttgatgatgataggtaaatgtgcagccactgaccgagcaatgtcacacctaggagcaacaatctatccaccactcggcagcaccatgagtgacagggtaactgtcaatgcaatgaagatgggtgcagatcaaggtgctgttgaaagcttaatagaagagattgttaatgtgataataaacccaatgttgcgacacattgattattactatatggctaagggcacagtgagagacatgaagattggtgtcaagacttacaatatgaccaacactcaatatgcagctgctgccatgatgaagccaatggtcacaaagagaaaagttaataaactgaccctgctgcagacagtagaaagaatgatgttggagcttgaatga

SEQ ID NO: 1233 - DNA, 13786 bp, Neofusicoccum parvum endornavirus 1
  source 1..13786: mol_type = other DNA
tagatttagagagagaattggattaaataaggatgacaacaatctagagggcgggtccggaaacggacccgcccgaagattacaaattttaaggggctcccgcacccctataataaagcgggaaagaaagtccataagactgcgagaattgacaaggaagtatgttaacaaatctagtggattgttggaggctaacgccatcgacaaatcactaattcagacatccctcggattcatgcagtcaatgggcatgtacccagacagttcactgctggttgggttaaatgatgattgcctgttccaaatgttactaatgcaattcatcaagaataattttaaaaacactgagttctcagaattcgaatcagtcaaattaagagcatcacttttagcacttaataaggccaagggtttggcagtgggttttaagaaccagcttgctgagacgaattggtttgttgattttccttccactttcatcaatctgtgcttggctgacggacaaatatcctctgcacagttcaagggtgatggctatacggtccacgacttggctaagtttgaggatgattccgatgaattcacactcaagatggagccacacaagacgctggttactttggattgggcaactatgccgtctaagactcatatcaagtgttcagctgttagatgtcactcttgtggccatgcagttaacataccaaggtacactcgtgtacatgcatcagaatatgacgacgatttccttaacgacaggtcatcagagatcattgctttgttcaacaacgagtatgtggatgtgcaaaacatgttctgtccttattgtttacaatctttggatcaagaagtcccaatcatggacaatgagtggattttcaaaaccatcgtagatgatgctatcgatcgtatccacgctggtagtcaactcgatgatcttggcttgatggggtatctatctggcattgatttggctaaagcttcagagtatagaaacattgccaccaaccatgacctgcgtattgttaggaatcaacttagccgtctcgatatacgggtcctatcgttgcctgggagtatgtccgagcaacacaagaaactgcttgctagattttatcccagatacgaaattatgagtggttccatggctagttccactagtccattgttgttagctaacgccatctgtgcaatgtcaacaatcccagaaatggctgatggtagaggtttaccaaccataatcactcaatccatcaacgagatgagaaatgttgtaaatattgaatccgtgttgttatccaccacccctgcagccaatagcaggctggtatgttatgatggaaccacttgtgatatagtttactcaacattgcactcgttaatatcacatctgccacaacagattgtggttatcttcccggcagcagaatacttaacaaaacgtgaaggccaccttagccacgattcgggtacttgggttactaacacaaattccgtgctagttatgcagtcaaccacatcagacgttgtttgccacgacaaacagttgctaaccaatattcttaccaagcaatttttaaaagtcaacaacactgtataccggatcgagctgatggacgaaggtcctacattaacaaaagctgtgttaatacatgtagcacatcttgccgtcgcagacattggtaaaaggattgtagtagaaacgaaacgtgaattcaatgtaccaactttgacatacaacacggttctaggaactatgaacatcccaaacatagtgaccaagagagtcacagtgaattcgaaggttctgcaaaccataatgactagagggttaactggcaatatgggcatccaaggctcacttgattatgctttggcaattgcacatgccagatactcgattgacgataccacctacaacatttataatctggatgcacaaggggccatagaacacgcttctattgcttatgctcttaataaacgagcggcggctaagcgcggtctgaacgttatgatgcaagaacttagcccatctctgcggtacttgggtcaggcaatcgcgtcaaccgtgcaatcaggattggaagtaattaaggctatgacccctaatgtaacgagtacagtaagccaaattctcgatgggttggacatgaatagtatgaatgtgttgacgagatacgcttcgaacccagtttgggatgaactagatgattgggtcacgaaagcaacacttgctgatgtgtcctcctttgagattaaagcaacagtgacagtgcatgcgtactgcaatcatcagcatgacgagtgtcaacatttgggtaacggtcaatgcaagtgttgttcgagtcctactgacgatgatatgtgtgattgttgtgatagcacctgcacacacgattgtacccaccaatgcatagggcatgataccggcattggcgagtggagcacttgcccatgctgtggaaaacaaatgcgtacaaatcaagaggtttgcataagttgtgaagactcacttgaagattgggacagtggcgtcgattatgacaggttctggacattcattggtcgtgaaactgataagggacgtaatgtagacgcccttcaagttaagccaaagtacaacaacgagtttatgttccgcatggcaaatggcaccactaaaccagccagaccagcaatcgaaccatgtacagttgtggatgccaaacaagggcttcacacgcacttgtgctattgtggcacaaggtatcagcattctcacccattcaaatccctgttgcacccactcttcaatggcgattgtccaaagtgtgatggtaacactaacaacctcgtcgtgtatgattcaaaggatgtgcaaaaaaccctagagagcgaaacattggaacgggaagcaaccgcaacgggagaagccatccagactagggcggtggatgaagtccagaaaccagagataaccccctttgcagacacaaccaacactagtaaactcttggttgccactgatacagtgtttgtcgacgcattggttggattctctggttctgactcaacatggccgacaactgatcacttgaggcctggtgaccacccaacaatgtccagagtcacatgggttgcacttggtgactatttcatgtcgcaaaccattctatctatgttagcagagttaccaagcacagaattggggcctatatgtggttacacatcatggcatgctgtggatccgaatgggccaacgtatgacgtaatatgtaatatcacaggtaagactgagtggttcgatcgtgatgatttgcataggtgtgctttatccacgaactcaaatttaataacggtgactgatgttgacaccagggtcacaaagggccagcctgatgattattttactgttcttttccatagctccgccatgcgtggattgactgtgaatcattggcaccctgttaaatgcattcaaatcaactacactagtgtgggatttacttatcattccgcagtgtccgtcaagcacatcatgaatgttaccaagcgattgactggtgggaccacatccacttacgatagtggtgagctggataagacaatgcgggtgaagttgcacttggagcttgcaaaatcggataccctaagttcgacatgggctaattctggattgtgggagtttgttttcgcagataaacttgatcctccaaggtttatacgaaaccgcgtcgatcaagcaatttttgaaagttcaattgatctgcaacagtacaataattggagtgtgactgtgccgaattgggcatacacagctatacgtgtgctgtgtgacaacacaccaatttctttgagaaacccgtggttaaatgcgccactaaactatgactttgatgctgatgcctcccatgatttggcacttgaggagaggttgcgatcattggtttacaattacaagataggctcttgcttccaacacatgcttgcaggtgatcaacagatcaattggattgatttaccaatagtgaatctaggcacaaagggtgttgtgttggacacgctcgacaccaaaatcaagaccggtgacattatcgtcttgccaagtaaaggcacagagaataaagatagattggtgcaattgactgttcgtgacagatatatcagtgttgctggaacgaaaacccctagttcaaaactcatgacagtcggcataccgcgtcagtcagccggcagttcattacgagccatattgtcattactaacaactcaagtgtcgagcgcacgcgttgatacgttgttggataatgctgtgggcgtcatggcaccgggtgggtggggcaaatcaacccacatggcgaatgtagctgatagcgattcgactatggtcgcgtatacaagctctgcagtggagtcgatcaagcaaaagttgcacgcgctaggaaagtccgttgtagtgatgtctgtagagcgtgccgccattaccaaagtggccaccaaaaacctgttcgttgatgaagcaacaatggttgacaaaattactttgaggatgttgttgactaatgatgttgaacaactacacttgtatggtgacgaatcccagattggcgtcattgataccctggcactgcccggtatgcgctttaacaacagcataattaccgcagcaccaaacattataagagaaaccggtacaaggcgcatcggcaaccctttggcgtccgagttgcataaggttgataaggcatacctggcattgtctgatcattccactgactttgatgttgtcaacatgcaagaaatggacttggataagattagcaggatcgtcaatacgtctggtgtcgacgccgtgctgtgtttccacaattctacgttgtcagcaatcaggcgcaggttgtctggtgttggtaatgttaaagtggcaaaaccaccgatagtcaccactgtacacaggtttcaatcaaaagaagctaacaatgtgttagtggtgcaatcaaggttgggtgacaggtctggcatagaagtcgagcgtgattactgcatttctgcagcaactagagctaaggtcaagttgatatggttaagtgtgggaatgttcaacacgtcaacaccgctgtcagacaggtttgggaccggaagtgtcgtgggtggtttgatgaatccgtttagacaattgattccaagaatgttaaccaagggaaacgtctctgatcgacaagttggaattattaaagatgtacaattcaataacgcaaagaaatcttatgagaaacaatatggtgtcaaggtcaaactaatccatgctaccgataaagacattatcgttatcacactgcttgggtttttggtcggcaaactcatagtaactggtagccaagatgatcctcacataagtgtggagtcggacccaactggaaaaatcactgctgacagggtcaagcaaatggtagacatgatcaagttgtctagtgcattgccaatcaacgtgatacaattagaaccaccaatgcaattgccatcaaaacacagaggagacataacacgcgagggtgcagataaactcaattggttgtgtgccaatgttgcactcaaacaagcatcttcaacacagcacgtggagaagatctgtggtatggtcgctgacatgcgtatttccggatcattcaaatcactagtcaaacttgatgtgatgagcgggaagcatgcatgcagtttgcagttcagtatgtattcaaccaaaaaatgttcgctatccgcaaaagacacagtcaactccaaacgcatggcgttagcaattgccgattgggtgggcttaatggcaccatcgtggaacgacgacatgtggtcgaaagtcagcacattttcggcgaccactgatttcacatgccctagaaattattcgctagtgcacttaatcacatcatatgtggatccaatgtggtccaatgcatctgacttgatgtcggcagttatgccggccgcaaagctggccagcggtgatgaattgaattcttgcatgaacaagatggcgtccttgggcgctgagatatttgttggagacgagcccgttgactatgttttcccaacctcattcgtggctaaaatgaagagttcaaaatggttggtgatggttgtagatggtacaccaaatgtgttccttgtggagggcaatcgtgatgatttgcttgccacaagtgatgagtttgcgctggcaaacattgatcaactaccaaatgtgttggccaagtatcatggatctagtttgcctttaaaagtgctatccaagttgtttggtggcaatcaggctaaccaattagcaggaattgacattgaaggtcttatgatgacaatggaagatcataaacggctgaatacacaagtaatgtcatacttgcaggacaaggcggcaaagttgagagtgcaaacatttaagaaaagacccaggccattatatgtgcgcataggcacgaaatccaagtatagagcgatgttgggacacatcgccaacgatttaccaatcaacataactaacgtgattgagtacaagcatgagcctttagaactagctgaaatgcttgcggttcattatgtgtgtggagcgattgggcaaccccaaggtgattctttgcttatatacactgcattgccgcatgtgccattaatgcaatcatactttagcgccacttcaaaaatagttgacacaaaagacatcaatattccacactcatcgttgagcatcaacgtggccaaccatgtgatcaacacactattaaggaaaccgaacactgccactgaggatatgatcgattccgttaaatctttgtcaggaattaaacaacggttagctgcacacaatgatgggtccaacccgttatggttacaagacagacccgaacaaccttttgcaaccattttgttcaatgcaacgaccgcaagcaagtcagttgaatatatcacaagggaaatgtatttgctacaagctgagagatattacatggtgacctgtgtaggcgatgaaattcgtgatggcagcgacgtctatagattcctatcgaaagatttgggcatgtgtgtctcagatgcttgtaggaaactagaatcacaaggtggttggactcacgatcaccatgtggtacatggaagagttgtcgcggccatggggatctgccgagtgtgggagcttcaactcttggatgtcaccaccgagccaagttggatgcacgcggtggtgactccattagatccggtcagcaaagtgaccatcagggtgccacatttgaccattgacgctttgcagctcacgcggtcaccattaataacaacccgagtggtaagagtcactcgtcaggtttttaaatcgatgtccttgcgcatgctgcgcaatggcacatcgtttggagacttgctggtgtatggccgcatgctgttgcataccaagtactttagccatgatggaatttcttcacaacataatgagacaccgagtgaagttcttgatgccgcattagcagtttggtccatctatggacccatggttacggggatgaggcatgcacagaacttgcttcagacatcagatgataaagagagcacaataatgcaactgatcaacccaacacttgagcatctaaaagacaattcaattggggtgctctcacagattgcaagtatttttggtctcgatatgtcattatctgattggataaacaccgtggctgatgccattagtggtggtgggaagactgccttgcatgaaatcgccgatcaggcagcaatgtggcaatccaaagtgttggaggaccgccggcagatcgtggaataccatgcacacacatccaagcgcatggttttgtcacaaggaatcactgaatcagaaatgtcgtcgaagccagtactcaagacgattgccaggataaccggtgctattgtaaacagtggtgtgtcaatagttaaaggaaggcagaacatggtagaaccttggctcaaaaatcgtgcgagccaacacctgatgccgcaaccgcgtcaaattggtgatgcaacagaagggtttgaccacgttcatcaggttggggtggatgtgcgtgatttcaacatattaataataaccacaggttcaaaaggtgacgtcgcaccaatcatacagctagctgactggctgtcgaccgtggccagcagtgtcgctgtcttgtgtccatcacatctgataccaacaacaaaatcattttcaaggattaagtttttccctgctgattttgatactgacaagcatcttgaaacgatggcaaaactcaaaagtagccccattgacaacatcgacaaacttttacatggtttcactgagcaactcaatttcgacaccattgacccggccatgtttaaggttgatcaaagatttgacctggtacttggcactgcaattactccgcaagcttcaacaatagctgaatactttgacgcaaggtacgtgcaagtgaacatgatgccatggtttgtacgaaatgtgttcggcaatgacagttggttaacagagaaaatgatgaacctacaagaaccgatgcttgacataatgcacatcgaaggcgttaacaggctccggtccagcattgggctacaacccttatctgtatctgacatagctaaattcaatcctcatcgcatatatatgattgatgaggccatgatgaaattgcgaggcatgactgcatcatggcaggctggctacttcggcgcgtcgcgcacatcaccattatcacaacttgatagccgtgattatgttgccgtaacgtatgggtcaatgcttgatgattggttggtggagcatagtcttcagcttgtatcccatctattggctgttggcgaaaaggtgctgtggttgaccggtggattaacaggcaaattgcagaaggatgacaaattcactaagctttgcaagaacgaatgcgttgaagtgatgcagtttggtgatcaccatgaaacaatgcggagatgccacaccgtgttccatcatggcggcgccggcacaacccaagaggcacataggcaaggttgcttttcagtgatcacgcctgtagcctatgatcaaggattttgggttgcattgacgactagtaagggtctggggtgcgccattgaacgcagtccaaggattgagagtgtgatcacagctttgcgcatgagtcgcaccaatcaaccagtgatcatggctacaataacagggagcaatgacaagtcaaagcacaggtttagagaagcattgatccgtagctatcatgagaaaggtcaaagactgctgtttccaaaattgttggtgactggagatgcgtctgacgtcgaccacttggtgttagtagatgaacccgtgcccgaagcagctgtgcgttatgctaaccagattgcggtgcctttcttacgaacagtactcagtgatggggcaatgctattggacgagtggcttgcgctacacagaccgtgttgtgacatcaacaatcgaacttcggaattgtatggtgagtatgtgcttgcaatctgtcatgacgtgtttgtccatatcagttaccaacagggcagttggagattgggctacaccacagtagaacacacgattcatcaaccagttctgccgttcgatacatccagaggcacggcatcctttgccacttacccaatgcatgcacatggacagattgtgataccgggacaacagttgggtcgacatgtagagatacacacaccggcaggggtcaaacaggcaatagaatcaaacagatggagagaattggtaaaaatgactactaggaaaaccataacgggaggtaagacgccgccgttacatggcacctgccgattatgcaaaaatgacgattgtgtggacctaagggcgtactgtgctcagtgcgctgcagtgacagattttatgcaagatgagtcattaatgatgcagcaacaccttgagactattaagtcgcttgatcaagcagtcagtgcaccaatcacctcacacactgctacaaccagtcgggatgatacgctgtggttcttgtcaaggttacctctcgagccatcttcatccatacatagcaacggagtttatgtcgtgaatgtaccgaatccaattgtaacttacagcccatccgatgatgggtattgtgtgcatagagctgtgtcacacattgcaagtaaacacagccggtggggtgatgcggcaatagtatttgactcattgataaaagttggggtgcctgcgtttttacccgtagatgacataatgccacttgtactcagtatgggcttcaattgtctgttgatacgcggcaacacgggcacaatgacccaaaggtccaaagttgacccatacatggtactgaagattgagggcacttcacgggtggtacactgtgtggcgtgcaacgtcaatataaacactgatgtaaagatcgtgaggtcagtaagtgtcaccaccacagacgtgcatccagcacaactggatagtcattgtgaagtgacgggattggggagcatcgtcatgccaggtaagcttgatgattgtgaggatcatagacatgtcaatctacacgacgtgagtaaagcgatgtcgattcttaagaacgatgtgggcaaaccgcacgcatgtgcgaatcaaaaacaggttgtgaacaaacatggttcaatcttcaataacaatacggttatgcacgaattcagtagaatgtacgtcgatcttaatatcagagccagttctggacattatgtcagtgtaatgtcaagaggttctggttgggcagggacagcgttgtcggcacgcggtaatggcgtatactggctcaattcgcaaccattcaattctggtgacattgtggtaatggttggtgacaccgatggtttcggtcttgtcacgcaacatgccgggattcaatacattataaccgacaccactaactcagtatactatgcttgttacaggtccagtgttcggtggttggcctcgatccatcagcgtagagacgtcaagacccgcaatgttgagcaatcggctctaaacaatcccacactaacatggatgcgaatggttgatcaaaaatacgacggactaaaagtgatgaaaatgccgacacaagtgctgtatgtcacacattatgatggcaggcaccaccacaatgataaggagttcatcaaaatcaaagacaccatgacaactggtgggaaaatcgtcaatggggcaacaatggcggatgtcaccaatctatttaaacgggtgatgttggacaatccaccgctgaacctctggtttaatgcgggggatacgcgattgatttgccacgttctcaacgcaagccaggtagattggcggtttattggcaatttcttttcaaatgacaccgtagtggagcacgatcaggccgtttcatgggggtttgtcaatgacgacgattttgataaagagctatctacagcaagtagcgcaatccaattgataacagaagagcgcggctccatcagggccattaaggactggaggcttggaacaactgatgacatacgaacagtgaaagatataataactaagttccatgagcacatgagtgatggtgatatcgaatatctgcacaggcttggtgacaccatggaagtgagttgccacttcattgagtctaacttgggactggccagtgagtcgtttgtgtggcgcaatgccactggtcgatttggagcaaatcatttgattgcaagtatccgcatgatagttgttggtgtccctagtgtcagagtgacgagaaagttcacatctttacaggtgacttccgtgagagattctgaggcattattcgatgacagtgatgaaggcgaagtgcaagcgcctcaaacttctgacctgcactcgagtaagacatcccaaacccaggaagatcaggtaagtggcagttccaaaaacgtggttggaggttacaccacaaaggatctggtcgcagtcaacaaaattcaatcggacacaagcatactcagtgggactgaacgacctatgtggtttgatgattctaaggtggataggtccatgttcaccgggtcagagagttggtggggcataaagctacgtaaaggccaattggtcaagccgacgacacaacaagacgacagtgaattggacgtcaaggaccatgccgtcaatgccttggaactcaatacgatgacatgcggcacgatatcaaatggtatccgtcaggcgctatcaccaaacagcaaggctttcatgccattcataccagccatgctagatgatttggagcttgtgccagagtatcgtgaacctgtcacgccggctgtcatgaacgtgctagacaatccagattacacgcattggaatacaaagatagctccgaaaacgggaaagatcaaaacaaatgagatgttaactgaattcgtaacgacgaataaaactgccatgactcagtacccggaggaaaataggccagtactaaccaaagggcctaaccaaacttttaatgctgtatcaacaaggttgcattcagttgttacgatgcggaaattcagtttagatcccgaggaggaaatacagggaatgtccgaatgtttcttccgacaagactggcgtcagcaatgtaatcattggatggatgaagatccaatagattttgatactgatgaagttaagaaatggcttaaaggcaggccaggtgcgctgcaagtgaatgcagaattggagagtgtgttgcgtgaaggcttaaccgtgagaaggttaaacgatgtcaaagtgcatgctaaattggaggctttgttaaagggtgcttccgctgaggaaccactgacgcaacagaaaattaggattatagtttggcaagccaaaggcatatgtgccatttttgccccagtgtttatagaggctaagaaacgacttaaatcattgctgaatggcaaaaccatttacgccgatgggtacacaccagatgagctagcagcgagattaagaattgtaactgattgcaactggttacttgaggatgatttgtcaaagcaagacagacaaaccgacatggacatattacgtgtagagtttttgctctacagatatttgggtgtgggagcgaaggttttgtcgttgtggcagcaggtgcataggcactggaaatacaaaggaaccaatgtatcgggaattttggacggtatgagactgactggacaggcgaccacagcactagggaacttcatagtgaacatgatggtgcattggagggtcatcttgcccaacttaaacaaagtgtgtcttgtgatgatgttgggtgatgataatatcatattgagttcagcgcaaattgacagtgaactattaaagaaaataggtagagattactataacatgcagtgcacaagtcagcataataaaaacgtgggtgtgttcttacaactatctgtgtacagatcatcggatggacacatggcatgtgggcctgatccaagacggctgcggttacgctttgagttcaccaatggcgtgtctcagacgaatgacgataatatgatagcacgcagcatgagttatctgatgatgttagggaaaaccaaagaaactgatcaagtgatagctgaactcaagtggccaatcaagccgctgcaatggcacaacctacaggagtcagttcaagcgagtgcacgaaggcacggtcttgacacaacgataattgagaatgattacacacttttgttgaacatgatcaaatcaaggaagacgtacaccatatcatggcaacatccggcagaaaccagaaccatgggcaggaaattgcggtga

SEQ ID NO: 1234 - DNA, 10051 bp, Ophiostoma bicolor endornavirus 1
  source 1..10051: mol_type = other DNA
ggccggcctctataaaaatccggccattaaaaataaacaacgggccgagctgaatgacgctcacgaggcagaggcgccggcccacaaactttggccaattaggcaccgcacgcaaggtcggctgctgagtgcccgtgccaatgttgctacgggtgtgtccggcactgtgagagcgagtggtggctgctgggaatgcatatttggctaccaattgggtagtgatgtgtgtatcgacctggacaccatcaagatggccctaattggccaggaggaagaggcaagtcacatccgtgtcctcgtagcaattaatgagggggtactccatttcagcaaccctccgggcctgccaacaggcacaccaagccccgaactgttcgccgctcaacgggccttcatcgagagctatgaaggcccagctgtgaggttgctcgatgtactggactcccataagggtaacatgctggttgggttcgaggctatgacactcgtagagcgcgttgcacgtgacgcgggtgtctctaccaccaatttgttgagcccacaagtcaaaaacgccatggatgagatggtgaataagcgcgctattcgagctctgactagccaccccaattgggcattcacactaccctcgtccacacctaatgacatcatggacgatctaaacaatgaatttggcgctggtgctttcttgcggggcaatctgcctacccacagccatgtctatcatcatgctagccgcgttgcggtgacggaacagatcgccaatatgttccctagaaacgccctgttatatgatataggtggcaacatcaatcgtcaccttgctcataaacgcttcaacgtacactgtgtttatgctacaaccaagtacgaagaccgagctaggcacgtaaagtgggtgaaacaggcggcacaatgggcaagtgcacagttgcagcaaccaactaagcccgacatcacgtcgcaatcggttgcacgagctatacttgacgccggcaactgtatgtggtgcaaagatggcgtaaagaattgccaacacaagccaaagactgtcgcttttggcatgtccatcgatacgctgtgccacattgaccctgccgagctcatcactttctacattgaacaccgtgtcgtgcaggcgactcatgcttttactatcccagataactttagtttcgcggtcgacggtactctacgtcacaacgaggggcgctggcaacgcaacctcgatgcaacctggacactagagttcgtgggtgagagtgtctgctacacccaaggtcttgctgtaaccgacgcctatatgcataggccattgttcatggccggcgacacagtgctctacaacaaagtgtgcggccggaagggcccacatatgatctttgaacactacctcttccctcgcagtgacgtggagcgcgtttatgcgcagcatgtgtcttggttcaacatgaatatggatgaaatattcgtgataattccacagctcgacttcgaaagtgcacctaccctagtgctcaaagaggcatacaccctcaagcgtgtaacaatcaacatccgcttctacgagcggttgttaaaccggctgatgcaagagtacagctgggcggcgacactagcgtatgcttcttcgatgatcggcaaggtctacgcaacgacgaacgggctccatttgaagtggaacatgaccaacgaagaagtgcgcgaccactgcctgctcgcgtattggagcacgaaccgtgttaacgaatcgctcaggccgattatcgcccaagcagagaagagtgagcgcagtcctgacttcttgactggcttgtgggatgccattaagacctggggtcgcgatttcgggggccagtttgatcccacaggttcggagctaatccagacgttcatccgcgaaaactctggcagtgacgcgctacgcgtgagcaggttgtttggtgctacttcgcgctccatcgagtcgcttaatgttgcgacacagatggtgaagtcgcggcgcatcgtggattgggtagcaactgatgttggcgtgattagcaccgtgccgccaagaacaatcgaccactggcgcgagtctttgcccaatgttgccgctgatgtgaccgtctatgacttagctgacgttgatgccagcacgattacgaagttgcagtcctgcaatgcaagcccgttgtgcaagcacaaccactcaggtttccatattcattataccggcaacaacagcgctttggctggcaagtgctcctgctgcgacgtattcagcactttggcgcctgacggtgcttgttatgtttgctcgccgcgaccacctgcccaaggcatgcaaatgcggtgcacgcataagcacctctggatgtcggatgcatgctgtggcaagggtgattgcagctgtaagcacacacacagttgcaagtgctgtggactcaatagtttgagtgactactgccgagtgtgcaaatttaacccatccgaaccaccgaaggggagctcgaagctgagcaacctggtgtcaaacaacacggttagtgcgccacccactgcgccgcctgctatggtggctaaggccccaataccaaagatgggcagcgcgccgatcagtcaaagtgccactggccctactgcgcctggccagaacttgccaactctgccaccaccgccatcgatgaatatcgtcgctagccagaaccctactccggtagccagtgtggcagctccggccatggccacgccagacgctgacaatgttagcgtggagccgccacccgtacgtggtaataccgcgaagcccaatgcccctatttccttcttggatgtgattcaagagctaaacacgcagccaccgaagcttcggccggtttcatccagccaacagaatgttgtcaataacttggtggttgctaaaaaagaagaagacgtgcctgtgtcgtcagaaccacttgcgcctgacgacgccatccctgagattaccattgtggatgcaacagccgatgggactacacccggccaactagctggccggccaattatcgccagctcggaagagactagcagcttacggactgtagacctgtcgcaagtcccgaaccaacggcaacaaatggtaactgccgtgctccgtggcgttaagaatgtccctggcgacggcatgtgcggcattcatgcactgaatgcttggctgggccgcaatgttgatgatttagaacgttgggccgacatagcattcggccactctgactggctagatggtgatgaattagcttacgttgcagctggcttccagcaaaacctggtcgtaatgtctggtgaagaaactaccatttaccgctgcaacagcaaccctgaggcaatagccattgtacatggtgagttcatcgggatgggactgcactggctggcggccaacattgaggtgtctatggtcgatagcactatcaacaaccgtttatacgacaacttcgccaagctgagcgctgccgtgcatgccacaatgactagcgtgatggatacagctgaggcctaccaccttcgatcacttgatgtcgatttcgcccttagcctgggtgggcgtgcctttgtctcgaaccgtatgttgcgcttggagtttgatgctttcgatgccgagcctaccttgcagcaatctccaaacggcttgcaaatgatagtgggcccaacaggaagtggcaagacaacccgagcgttcgaactattgggcaagaagaaactgttggtgatcacgccatcccgttcgacagtgcggagcttgagttatcacatgaaaggggtgtttggccgggctgatagccgttggtggccaaaagagaaccctagccataatgaactgcaaggcgcggatatcatcttcctcacagtcggtgccatctataaggcgcttgaaggcaacaaccagcaatacaagcagttcatagccactcggttggtggtgtgtgatgagatccaccaatttgaccatgagtacggcctggtactgaaacacttggacccccaaagaacttggtttgcgacggctaccatgcctggcatcgcgcaagacatgcggctacggcacagaaatgccatagagttctgtgctcaagatattttgcttgaactggcagaccaagcccaggagggtaatattgagaaaggctgcggtgttatcgttccgtctaagcgaatgacgtataaccaagcccaggtaccaggtattacatctgacaccataggcacctatgatttgcggttggttgaccggttcatagcgactaactgtgtctctacgggtgtgaccataccgcaacttgttgacctgaccgacctcggccaacgctatgtgatccatattaatttctaccctgaacccgagaaaagtaagacgctgttcaccccgcagttgaccacttactcgcgggcagaattcgtgcagacacgaggtcggacgagtcgcgtctcagatggcgtatacacgtgcgctattcctgatgtgaacacaactttatcgaactatgagctcttgcggtgcgcagctttgctcgggacaccctgcagtgatgtttaccaacaggcttgggaaagcacaaacgaccgcatgtttatagcggtgagagaggcccgcgataaatgcgaatctgagtccgagagagaccagtacaatgagtggttggcagtctacagccagttaatgcagctacgcaagcagggtgctaagccgcggttcgtgacgagttctgtgtaccgcgaagacctactattgtgtatccctgatttagtaggccagtcccaaagttctcggccaaagaaggtaggtgcaagccccttcaacctgattctcgacatggagagcattgtgcctagagctgtctatggtgagttcgcaggtgcagaccacaaaaaactagaagttaagatcgagtcgagtgaatcttttattaacctcaacatggatactatgtcagaggctgctaagaaattgcggcttgttaccctagcttccgtgtacaaaacagtacgcacaatagctgctgctatgagaacagttaacaatagccagttgtgcaacaacagtcccagcgattgcccgaccttctcgtcccatgacgcaatgatcaagctgacagggcggtcgccacggcctgatgacctagtgggagtggttgacttccggactggtgacgggagcgtgatgcactacaaagacgcccccgttggtgacagttctctcaagtggagtttgccgacatacaggtcgggccaactgtttgccgacctgcgcctgctaaacaacttgagcctgaatataaacatcagagattacttgcggcagtgcatagtgctctccgggccccccggttctggtaagaccaagcgcatgctggaggagtatcaagtcgaggcagttgccactacgagtgagacacagctgcgcctgcatgatgattggttacccccgcatgcactagccgaccattacggcgtgcttggtgtcgacgaggctgggcttctgagcttggcaacactattcgtcctgatatccaaggcagacaagcttatctttacttgtgatttgaaccagatcacacacgaggtggatcaagccacatatgacgtaacgggcacagactcggctgcaaagttgataatggaaacaagtgaagtggtattgttgaccgattcttggcgcctcggcgtgaatgcgtgccgcttagcggcagaggtcggcacccccatcaattctgcgaccggccatgttgatgaaacccacgcagtggtgtgccaagttggtaacaatgccagcttcagcgaggtgttaacagacgccagccctgatctagtcatctgcgcaagcaatgcgttagcacgtgatttgcgcagcttcgtgcaattgcctattaccacccttaatcggtgccaaggggctgacgtcgaccgtgtgctacttgttgttgcgcgagtggatgttatgaagatccctttggaggcgctgtacgtaggcttaacacggcacaaaacagcactcacaatcgtgtgtgataccaactccgctagcctcatgaacattttaaaggtgacaccaactagcttgatgtcttacgccaaggctgtgggtgggcaaggccatattgactttagtttgtaccaagacatggtggagcgactcagccatcgtgtaggtctggcacacatcgaacgtcttgttagttgcctgtacgaggtcgtacacaaccatgaacagtacatccaccctacgtatagcagtgcatacacgggcaatgacttctccataaatatcaccggctactaccacggtcgagctcaagcgtgtgtgatccgcaccagttatctcttgcgggggaagagatatgtgtgtatgctgaacgctgacgatacggtgcagcaagtgcgccataaggtcttgagcagagtgccaacccgccttattgttgccacgcttataaacgtgggggcacggcgctttacctccctgggtgctgatttctgtactgttatgaaagtctggttaaccaaggttgcgcaggcagacggggctaccctgtttcgctgctttaggggttttgtggctaccgccgtgcaaacagcccaagggttcgtcgagacagtggtcaagttgtgctatcagagcgttgaatccatcagtgagtttactaaccagctagtgagcatgggtaagttaacagccatgtccggcgctgaagcgggcaacgcagttaaagctgcgatgctgcatatctggcattttgagcgcaagcattcgaaagcttatggaggtggagagtcgatcctcgacatgcttctgcgaattttgagatcagcggttgggagagcagtgtctacgatcactgatttgttcaactggttcgtgagtttgctgcgcaagaaagaaaccgccgatgcagagttcgtgccaattgtaatgaccgataatgttttacaaggaccgcctgctgaagatcaagtgaatgagccgctgcaagtagttccaccggaacccattcaagaggacgtaactgaaagaatttccttgaagtcgccacagctcaagccaactacaacttgccacccagatagcttggtccacgttgagttcatagagacaaaactcaacgtcatgacgtataagcccaacttgcttgggagggcattcttcaagaaagatgagacaggactgcacggcggcgtgaatatggggcccctgcatgtcaacttccatatgcatgagtgttgtgatggtttacaaaaagtgatgtatgccaatgcgagtggggctggcatagtttacttgcagcgtgccccgggtggatataacctactctgtgatgcagatagtgtgaagtcagttgacacgtccaagatccagctggctctctccacaatgagcagattcgggggcgacccgtctggctttgtcgacttgctgatggacatgctgaatgctgtttgtaaatttgcaaacaagctatatgacctcgccaagtggaatgctcgggcagtgataggcacttgccaaactacttcgtttgccacagataacgacgttatcagcacgtataggctgtttgcgtctggctacaatcgcacagcttggtctcgccgcaacccagtatcgtataatgtcagtaccatgttgaccacagccaccatacactactcagatgcatctcaggagtgcttcgtggtgataaacggtatagggtgtgatactctagtaacagtttacagcatcggcgagccgccaactgctgttttgcatacggcatcggtgagtgcttccagctatgacgagggcacagtgggcggtaaacgttataacgttgatgctttcatgaggttgggcattaacttgaaggctctgcagtcaacactcacaattgatgaagcaaacttcatcaaagagaccatcgacaggaacccgctggtagcagtgtttgactatagcgctgagacaacgcatactaaggccaaagggttagtagacatgaccatggagcttggccgcatggcggaaattgaagctaccgagaaaatcgcacacaaggtagcttttgtgattgctagcggccatggcaaaaccaccacagttggtaggctgcggcgtgagtatcctacatatactgttttggatgccgacgaagtgcagcaacaagaatctatcctgttcaagccattcagtgagaagatggagagctatcggttgaagatacaagaggaagttaggcggcgacactatgacgccgtgttcatccatgcaccagagtgtgctccgaagggttacaaggtatacaacatcgtcaacacgcaggccgaagttccccgtgatcggatatggtcgcgtgacaatgttatacacaatgagaacaaggtgagtcgggagagcatcctgttcgctgatggctatgacgctgtattccgtacctgccttagggtgctcagccgtcgcgtcgtgaatctgctaactcatgaccgaaatggcttactcattgacaacatcagcgacatagatggtgagaatttctttttgcatgctccccatgtggacagcatagtacgcttgcccgggggcaagcgagacaagctgctgttcgacgacacccgtcatggcatgggtgagcagcgcatctaccagacagggccgcatgtcggcctagccaggcccacaattcaagctgaggcaaacgccctgccaaatgctatcactagccggctgatgggtcggttgccgttgcggacagataatgtgagtgtacttgggtaccatgccttgatgaagaagaattggcacagcaatgcggatgcgatgctagaggcgttcggtagcgaccaaatctccctttcgctacaatctgtgctggactggttggttaacaagggcgataagttccgcttgtacaatgacatgttgaaagacgtcgcgaagaatgagtatgccgttgaccctaaccaggcttccgttcactacaaagttgaaaatcttctcaaagagcaagttaacgatgtgttggaccaggtcggtcgggtcattgtgtggaataatcagaacatcaacatgttcgcttgcccgatagtgaatgaagcaaaggcaaggctaaagctgttgctcaaggacaatgtggtctacactgatggtatgagcacctctgacatcaacgcgaagcttaggacttacaaggctagccacatcctcgagatggatttatccaagcaagataggcagacggataagcagattcttgaatacgagtggtggctgttacggcaacttggggtctcagacaaggccgtcgactttattagtggtgcgatgccaaagttccgcatacgcggcacgaataatgagaccgcaactctaccagccatccatttcagtggtggcgctatgactagcatgggtaatgagattaggaatctgcttctagtggcagactgcatcaaagagtacgttgcgatatttacactgggtgatgatagtctcattttgctaaactacgaaccagatttaagttacatagagagggtgtgcaggtcgcgtcacaatgttgtgaacacagctgtgtcgtctacaacgcatggcttgtttttacagatgattgtcactagagacgacgatggctacttctacgcctcgcatagtttcgctcggttgcgtgagaaattagcgtatagcccttatccaaatgacagtctcgaatggaagatgaaatatgctagttatctgatgatgatcgggtatacgcgtcggaacaaagaagcaatgaagtactcgggttttgtggcgttccccgaactcggcacaacgatgactgagcgcttacacgctaatgcactcgcaaacaattgctcagttgaagctgttgaagtcatcatttcagatatcatcgacttgcggtacgtgcaaagtaagaaacatttgatcacagccaccactatactaaggcccaaccgcttgaagtttggcaataaacgtgtcggcgactacgtttatgacacaaggttcgagagtcggttattatctgctttgcgaggcctcgagtga

SEQ ID NO: 1235 - DNA, 13680 bp, Phomopsis vexans endornavirus 1
  source 1..13680: mol_type = other DNA
atggattcattagctctacatactaactcaaaccaaaggtatgaacacttaaagggtggagtgctcaatgagcactccactcacattaataaacggccaataactaataaatatcgtcaaactatttcactaggtcaagctaagaaatatagtccatggttaaacgatgacttgtcagggttattgggccaaccgtttgctcttgataaagagctactgacaaggtacaaattttccatggacactttgggtgacacttcattcgaaaaatttatcgatggtgtcgccaatggcactctgaagatgccaagccatgcaaatatgggcaacccagacatagtagattctatcaaagaaattgcgaatttaatgccaaaccgtgcttcaccatttatgaaagcattgttgaccagcttccactataaggtcatgaataaaccaacacctgaaaatataatcaaagtaattaaccgcaaattgactactagcagcctgcaaactttattcatcgaagaactaactggttccagcctgtttcgtcgttatctagaagctacttgctataacacttatacaggtgtgaagtatgaagcatggttgagaccgtgggcaaagatgctattgcgagagggtaaagttgtagctgagtctggccattattcgatagacggaataaacggggcagacgcaagatttatacaatgccagtgctgtggccgaagctgcaggagtgtttatcgtgacatcatacccactgacgaggaggaggagtatggattcgatgaactccagaatacattcatagtggatgtaactgatttattgtgtccatattgtggtatggacctgtgcatcacttccatagattcagctaatccacaagctgaaccatggttgcaaactatcactgaacgcaaacacgcaggtaatcaattaaatgaattaggcctgttaggatatcttagtggtatcgccgtgaatgctgataatatggctcgatctgtaattaacaaccatgataaccgcatcgtcaagttattcttggatcgtcagcgactagacgtagttttagtaccagctggtttatctgcagggactctaggtaggttgaactcacgattcccgcaatacatttactctgaaagaccagcttgggcaacagtatgttcagagctgagagccgcggttatatctaatattatgaatctaagccgtaaggaaactcaaggacaaacactcttaattggcaggaactttaatcaggaagcagaatcatggcccaacaagataattaactcattctctggtttgagcgccaagcataaatctataattattgacttgactacagttggtctaaatgaagagcagtttgcaattagtatagagtcagcacgaaacgctctgcacgtgattacagttgactcaaccaacggagtgaattttgttaacaacggcacaggttttgagggaactcttgaatggttggtgtccggtaaccaatttatcctgaacatggctgatagcagcacacctattcaagtttattccccacttcaggaagctatcactacatataattatataaccctcaacagcaggatgtatgctatctttagaaccaggccctacccaggtattgtaagcataacaatagtgcgagctagtgcttccgaagaagtatacaaggaagtgcaactaactagtcctaacaaggttaaggactttacttaccccatgatctctaatagtgctttcactcacataagtggcctgcccgttatgacggtcgaaaggtctcccataaatgcagaacttctcaagactttattaacccgtaatatgacaggtatggcagcactcaatgacactatgacgtatggtgttggatttgcgcacgctcgttatagtctagaggatagaacaataagtcactttaatatcacaccaacccaggtagcaacaacctcttacctagcagctgtgctagctagtagagcagtggcgaagaggagggcgattgccgacattgttaaagccgatccatcttcaaatcaactgtctagtctagcagtcagtactataaccactgctatagattgggtagtcaagaaccaactcaaagactcaatcaagccaattaatgacgttttggattctattgacaacgcatcacctgggatttattctgaatttgcgaaccatgcagtatgggacgaactggaagattggttgagcaaaacaacctttactaaggctaaaatatataagattacacaagcgaatagcgttgagttactgatatgcccacatcaacctggcgagatcgatccacagtgcgcatgttgtggagacggtatggataatcagacatgcgaacattgcacggtggtttgcactcaccagtgcacacacaaatgtaatggacatgggaacccaggattagctacaatcacttgcccatgctgtggtgtagcatcagctccagctgggtgtccttcatgtttagatcacgtgatcgaggatatggttgaatctagtaaaatattagacttggaattgaaagcgaggagaaggagcggaccaggaagggaagataacttaaagcctaaggaagctactaagaagaagcaacacggcaaggagtccgataagatggaacagggaaatgaacctgaagaactagaggaagaaactatcactgatttagaacgcttagtagataaaactaatgccgagtttgcctccttggttaatatgacagcggggcacaatttgatgaatgatagtccggagattactaactggaactcacaagttacacaaatcaaaaatgcactcattattaaatacattccttatggtacattcattggccataatgacatgtttgctgtaatttccatcgatgaaaacaacaaaccgaaagaatactgtggtttcgatgctctatatcattattatccagatcaagtcagtcttaagagcatgcaaatagcatgtcataagcaaaatatgttcgacgagaatgatattgctaagtatgcgatgaagactaatttaaatatagtgatactaacagatacgagttcaacagtcgttaaatccaacataactaatgaatttgttgcaattattcatggttctgctttggagggttatgcaacagatcattggtatacagggcgtctatctatcatgcgttttatcgatgctcccttatgtttcgaatcagatacagcagtcgcacggctgaacaaggcggccaagtcgttttcaagagggaagatcaattcagcaaatccattaggttttagcaaagacgaacatattaaattccacctattgttaaccagaatgtcagacaatatattgtcgtgggtggataaaggtttatggccgatcactacctcgaaggacgtgataactaagcttagaatcgggttcagtgaatcttcaactgactttgatgatctggaaaaaccaggattagttatagagatgaagtcttggaacgaagaaatactacgtatgttggttggatctgatgagaacacttatcactcccgccggttgaatatgccttggaacttgccagcacagatccaagaggatttgaccgaacaaatagttggtgaaatgaggtcgtgtattataaattatttatcacttatatatgatgaatcgattctcgaccaaaacaacaaagcgatagagtggactgaatgcccactcgtaagaaaccaacatgacgccgtgatgatagacgtctcagaaacagtcattaaaactggtgatattatatttgtgcgtatgacaggcaacgataaacccacgccagtgcaggtaaccattaatcgcggtcgagtggtcataggagcaatgcgcggcgtcatgaaaaagagtgtaacgattggggttccaaagatttctgctggcagtgaattgcgccgcttgtatgctctatccaatgccgaaacgaatggcgagagaataactgacttactactagcatccgaaggtatacttggggttggtggatcaggaaaatccactgaaatagccgctttaatgaagccagacgatgttacaatagcgatgtcaacagttgcaattaatggtgtcagacgtaaggtcgatgaatcactacatccaaacgttatgtcggtagagcgttggtgtttgaacccaactaaggtcgacactctatttatagatgaatgcagtcagataagagctacgaccttagcatgcatattatccgtgactccaaacaaattgcgattgtatggagatactgaccaggtcggtgttttagacactagcaagctgccagggactaggagtcttctcagcttagccgatctggctcctggtttaaaacatacgaagaaaacacttcggtttggagaaccactatccaaggaactcgccaaagctgttaggaatttggaaggtaatgaagaagtggttacaaactacaggttaatcaatgagccgaccatagattatgatacaattattgcattaattaacgaggaaaatccagacgttgtgctaacattctaccactcacatagacgattcttgcagaggaagattaaggctagtacacaaattaaaactgtaagcaacccaaatgacacaaatggaatgttactaaccacggtgcatcggtatcagggtaacgattcacccactgttatggtgatacaaacacgcacttcaccccagccaggaattgaaagcgataggcattacacactatctgccgcatttagagccaaaactaagttaatatggtacacagcaggtatttatcaggaaggcaccactctcggtgagatagtgaatggaacaggttatgctgccggcggcctagcagctggcttgaaaaactggcttggccttctaccagctagtattgaaccacaagttaccaacacaagtgtcaggccaattaacagggccgttttcgaatcaactaaatcgagttacgagagtcaatataacgtcagtgtgaacttgaagatggtgggtgaaatagaccacgtcgtaatcagaaagttcggtcgaccttgggttgtgtttgccgtggatcgcgatatcaacgtcaccgtagttcaagattcattcaatctagtcacggatgagaatattaaagacatggagaaaacactgcgacagacgtctaccatgcggccattggaggctgagaagactgtacataagccaagcacttatgtggccgaacgttcaacacataatgaacagagctatacctattggcgctggctatacttaaactgtgctagcattttatccagtaacacaccatatggaatcttaatgacctttggcaggtgcaacatacaagcggctggtatcaatgataggctacaatcactaacattttcatataaacgtaaacctttcttaaccataactacggactcgaagagttatgcgttcacagcatacatttcaacaaggtggggtggcaaatcgaaggccgcgcaaatatgtgatggattgtctctatccatagaagctttaagtaattacacagtatcgaaatcaacatggatggatgaagtcatggcgtgtgcaccacgtcacttgaatgctatcacgcagttacaaaaatggctatctaaactatcaggtttcttgccttcttggatcaattacgatattgtagctggcggtgattggggaactcaagttgagaagattgcaaattctttagaccatcttaaattaccagtgtttatacctgattcgagctaccgctccttaatgataccatgtgtgatgactgagattaaaggaacacggtgtccaactttcctaattaatgaacacctacgcgtgatttgggattctagcaaacccactccggatcccataagcggtgtaatatttgaacaccctgaagatgtcccaaatttagtagcgactataataaatgattgggttggtaacaagctacttaattatctgattggtaataatcatgataatgctcgggctggtaatttcgaaattgaaggtttgatcttaccgatgtcgaaacacaccgctgatggcgatatagtaagttccactttaataaatcgtctgggaaaattgaccatgcggagtaagcgtggtgaaggcttagctatgtttttgcctaaggaactatttaatatgggttcgcacatagttcgcagccaattcccgaagatcgctattaaccgcagtaattactcatgtttagatgatcactggatggagttggctgagactacgatgatgtatgcacttaacgaatccactgccgacacgacaaacatgatcttaactgcgcgaccccacataatcactcaattgtctgccactaacattagaggactatgggttaagactaaccatccagttgatgacataaacacaatgtctacgtatttgtgtaatgaagtgaccaccactatattgtcaaaacaccaacgaaaccaggctaattcggagaataacaatgaaatgaacccggatctaatctcgcttgttattgatgcatcaaaagacggtaacagctggtttaatggcactactgaaaatgtaccactcgaccaagtagtccatatgggcgttgactgcctcaaattgccacaagatactataaaccagtttattcaagccgttaagtgtcgtgagttaatagtgcacatcccaaagagcaagattgataaagatgaatttaatacatacatagaatttgattctaagaatcgggtgataattgaagcatggccacactatctggtaagtaatggaacaattacctttggtggtaagttgtggaagattagctcttcatttgaccgcggcctgactactgggttcgtattgaatcatgtagtgaagaaccaacacgaatggctctacagcccaccgtctatgttgcgcaacacctacaaggttaaaattgaagttccgagcctaactttagacatcctacagacaaccagggtaccaatcttgtcaagtcgagaggtagaagttgattcaagattagttagagctttagggcttagaatggtgcgcggtgatgcagatttcacgaaaatgttaatattcggccggataatgctcaacagtatttattacacggcatccgacactaaaactcagtacgacgcgtccaactcagaggttctagacacggtattagcatcatactgtatatacggttcgctcgctaagagactgacaggtgcattcaacatcatgggccgcaagagttatgctagtgatgacaaacaaaatctccttagcacaatgctctcagcaaccaccgaacacattaaatcaaatggtttagctattttaaaccaagtggttctgttaaccggtttaaatctcacaacttctgaatggatggaaatcatcaatcgtaacacctctaacgatgaaacatcctttatgaataagttagctaagaagcacgaatattggaaggcaaaattaatcaacgtacgtaggcccatttacgtcatcaacggatacaatggcaacaaagcacctgttataacacgacggcaactaagtatggataaggaattaccacgcggacccgatgtaattgccaaggtatttttgggtgcagttacttcaggaacaagtttcttcaagtcctccaaaccacaatcaaagcactggaaggaacctactaacttagaggtatctgtgaatacaacaaaaaatactgggagatctataatgttaatgactataggtagtactggagacgttgctccttttgttgaattagctaatgggttagctgaagccgggtgtcaagtatccttaatctatccatcggggtccaaatcatctgcactattaaggaagatcaactcatccgttaaccagataccacttgagtttgaggtgaatcaccacttagagttactatcaaagaccaaggaaggtcttaactttgacattgagtcaacactaagagagttcactgaacaactgaactacaaggacctaacaattgacaaaatcccgcagagcatcgacgtagtaattggcacagctattaccccacagggctcaagcctagcagaatactacggcgcgcattatctcgaaataaacctaatgccatggatggtgctgagtccgtttgaaaaggaatcctcactatggacacggactttgactaatatgcaggaaccaatacttaagttagcacatctcgatggtgttaatgcgacccgggataactttggtttaaaaccaatgactcctggagacgtcgttaagcgccgtttcccgagagcttatgcaatagacgaaaacctgatcaaggtaaacagcacgcaagaatcaactcaagttggttatctaaccaatcgtgataattcagcattccatcctcgctctgcgaaatctgcatgcatcacatatggttctatgattgaaccatggttagttgatcacgtactgcaaacatcaaggtttttgttggaaattggctatgaagtcacaatattagcaggatctttggttaaaataatgtctactgatgatagagcacaattaatagccagcggagtgagatttgttactggattcattaaccaacacgaggaatttcaacgccacgggattgttttccaccacggtggtgctggcacaactcatgaagttctaagaagtggggcttacagttgtattacaccagtcgcttttgatcaaggattttgggctgcatgtgctatcaaacgggctttcggttgtacgataaagcgatcaccgtcattggatgaagttattgacgtcactaataaagcacgtataatgtcaaataaaattactcacatggaagaatttaatccaacagtgagcattaataatgttatatcttggatgaatcgtgagactaacactaatatcaaaatcctaaacacagatggtagtagccccaaacatagccatcacgtatatatcgacaagccagtaccaaatcatatacttgcactctgggatgaagttagacccctttatcgagattggatggcaggaaatgtagtatggttagatcaaccagtctcacttggccgtccatgttgcggcgccatgacctcatgggactgggcacttggcttctgtgagaacactgttatcactgcgtctaccacatttagtcgcgagaatcctcagttaaactacagtatatgggaacatacgattgaacagccagtactaccatttgatactattaggggcccagctggcactgctacttacccaatgcatgcacacggtttaataccacatgagaccatgggcagttggaaagaacctgaaatatatactttagccggcactaaacaagtcattgatgaacagatgtggttagctgataccgctgctacagtgcggccactccgtactgacacgtatggtagggctcccgcaccaaccggccgctgtaagttctgcggcaatgtcgcatggatttaccgagaatttgggtgtacgaactgttattcctgtctgagatatttacaacaatcccccataatgatcgatcgagttaatcgatacaacttgaaagtggagattggtgagttagctagtagaaggatcagctccactgacttagtcaggaattactctgacgacacaagattgtccaacctgataacagaaaacatgaacctcgggacataccaactaactttaagtgttataccaccaactgagtatgaccccgatgataacggttattgtgtaagacagacattttatcaagcattaaaatcattgccaatcaatttggataatgaaagtgccagagtaataatgtccgacgttcccattccaaagaatgcacttgtgacagaaatacccggttatgccttcttactaaataccaacttactggttataactaactccagtaaggaagctatattctatctatttgacaagacatggcctgtcatcactctacacctgacggggctcggagcacaatggcattgccaactcctcatgaatcccgaaccacatcacctaatgaatgatccagagttattgttcaattcacaagacaacgttgccggacctgtcgaagtcaattgttctaagagagagagagtgtcactgcaatggaatggtatggccgacgactgtgcaaatcatcgccatatagggaaagatgatctaagtgaaatcattaaatatatacatgagtcaagtatgaaggtactagggagtggttctgcactaactagccagcaagttatgcggtggttggacaacttcactagtgaatctgataaagaactcaggaacgctctgtcatttgatatacctaatgcagttggacgattaactggtggaaacctccgtcacgtatcttcgcgcggatatgacaatagggttatcacaactcgtcactattatggcaatatactgcgagttgaacaatcaccagatagtctattacagaactttaggcaaggggacttagttacaattataagcaatagtggaatcttaccaggtatatgttatactcgcgcgggtgcaaattacgtgatactgtccgagagtttaccagacgctgttagtatagcattggttattaaaaccggtgcttctattttaaccgtgaacaaacccagagccatactaactttacctaacaagacttctagtgtaattaatattcaaacacaaaatatgattgaagactcgaattcgggctgggccggtgtgaaaatctgtgatagaaatgcaagtgtctgttacatgggcgattgggatactcgaactcatcacaatgatcgcgtgaggtcttatttaaatgataaactgaatgaggaagaattcaaggttcttaacttccccactaacttagatatcaccaagcctttaaggttaaccattgataaaactaacccatttaaattcactgtaatcgatgggataaacagcttgaccctattaggaactacaaacccccttaacgggcgaatcctctctaccataacttctagtccaacccgcaacacctcaattggacagtatgctcatattagcattggcatgatggagctgtgtgatatgctacccagattaaatgaacgattctcagttatactgaagtacaatgacaacaaacattcaatagacaacgttaagcggcctgctatgggtatcaaggctgtcctacgatcgaacaaagttcgttcagtattacatgctgatgactaccaattcttgcatgatgctatggaagatgacacagtggtggaactacacttcctagaacacatgacagaccacatgaaccagaggtggtggatgaaagatgatcccatcttcttaaatggtcgattaggtttgccaaagtcactggttgttgtcgatgtacaagatgctatctggaatgaaagtaaacaactagaaacagccgagactccggccgacagtgacaactccagtcagcttgcttttgatttaagcatcctacgaagacatctgttgacgggggagagaattggagattcagcggacgtgaaagaagcgatacgttcatgcgtgagcatgatctctgatgatactccgatacttatcgagactttaattgaggagtttggtatgatagggccaattcgatggactcgtaatatgaaatctactggtgatttcactccaacacaaagggaaggcattatgctgctggggacatccggagttgctcttctggatggtaaaataactctaaaccgaaagttgaaggctggcggttatctgccctcatcagaaatcgatgagcatctccagttaaacgagaaaccggacaatctacaacaaccaaacagagtatattggtttgacgatgccgtccaaaacaggagtatgtttactggtggtgaaacatggtggaaagatacactcaagatgaatcataagaaagaacaatccaaccagagcaacttccggtctgatggtctagaggcattacaaattcaaggtctaaaagtgaaagaattgggccggatgaccgattacaaccacaatggttcactaaaggaagtgatggctccagtaggtcgacattttataccatacattgattcaactacttccgagtttgaactagaggaatttgttaaacccgttatcacgaacttggttatgaatatatatgatgatacagacttgacttcatggaacacaaagatcgcacctaaagagggaagactcaaatcaaacgagttactcaatgaaattcgaatatcggataaaacattgatgaccgaatacccagaaatgtcaaagcccgtcctgcatcgtggccccaatcaaaccttcaatgctgtatctacgagattgcactcggtgatacactacaggaaatataaattaaacattcaagaagaatgggatcggtggactaaagtttacttcaaaccaggttatcaatcaatattagaatcaatgcaaagttcagagaatattataaaactagatactaaagccaccttggactggattaaaggccgacccggggagattgcaatagattccgaattggtaaggctgcttgaggaagggatggcattacatcctatgaattccgccaaagttcataataaattggagtcgttactgaaagaagatgttgttgagcaaccgatgactcaacagcgcataaggatcattgtatggcatgctaaaggcacttctgctatttttgctccagtgtttgcggagatcaagaaacgattaaaaatgctatttaacagcaagatagtatacgcagatggttaccgaccagatgaattaagcgcgagactacgagttataccggctgacacatggaaaaccggtattgatggagcaaagcaggatcgacagtgggatcgcgatgacctaaagttcgaagaacatgtctaccggatgctggggcttgatccagccttactatcattatggatggcatcacatcacgactggaagtataaaggtaacaatgtgtctggattgagagatgctatgcgatggtccggtcaggtaactacgtctttaggaaatttcatagcaaacttgacatggaattctagaactatggagagtaacttcgataagattctaatcatgcttggtttaggggatgacaacttgattatatccaaagagcaattaaatactggtgagattaaaacaacctctaaggattattataatatcggtgtaaccgttgatcagtcaaaagatgtcggtgtcttcttgcaacttctagctcatggtaatgagtcaaactttctatcaatcagccccgatatacgacgattaagaatgaggtacgaggtgactaacggtgtatcctcggcaactgactctaatctaatagcacgaacgatgtcatattgtatgatgttgggggatattaagcctgttagggacctatgtactgctgaaggttgggaccttccacttgtgtcttactactcattggagggtgctctacatgctggtgcagcaagacataaagtggaatatgaagaagttcggaacgacttgaatttactaatcaactacatgactatgcgagagactagagtggtgagctttgagcatctatcagagaggcgtaatttaaattaa

SEQ ID NO: 1236 - DNA, 10794 bp, Phomopsis vexans endornavirus 2
  source 1..10794: mol_type = other DNA
atgacaccacaacacaacaacatcatgaccactcacgccgccaaacataacacaaacaagaggcacctcgagggcctctcaaataatacctcgaggaaaaaccacacacaccatgctgatcccacgcattatgccatcgatatgccaacacgccgagtttggcccaaagttgctaaacccgttcggcggttactacagcaacttgatgatattagcgatgctaccgtgtttaatctgagcgatgatgtgttggttggatccacctcaaattgctggcaatgcatattcgggtatgacatcggtgcaaatgttgaggtgccaattagcatgctcaaaatggcaatcattggccaagaagacgatgctgagcatatatggttgcaagttagccacaatgatggcaagctgcattttgaaaacccatctggactacccacgggggagccgacgccggagctttttgcagcgcagcgaaagttcgtcgccaatggcgtccaggggtgcattcggctaaccgacatcttggcagccgcagatggcaaaactatggttgggtccaaatcagtcacgctttacgagcgtctggctactgaccttggcctgcaaggtacagatgttaacacatctcagatgaaaacagctgttagtgacatggtgaataagcgctcgaccaaggccaccacgcagcacatccacccaccaattatactaccgagcagcacaaacgatgacgtcatcaatgacctcaatgcctcatttggtgctgctgctttcatcagaggtaacaggcctgcccacccacatccctatcacaatggcagcaggaaagcagtcacaaatattgtaatggacttccatccacgaaacgcaatcgtctatgatattggtggcaaccactatgaccacctaactaatggtaggttcaatgtacattgtgtgtacactcatgacaacccagctgacactgcaaggcacatgaaatgggtaaagcgtagtgcagattgggcaaagcggcaaatggacaatcaatcacagctcacagacgcacgtcgtgcgaagatggcggcaggtgcactggacccaaatagcaccgatgtgtggtgtgacaaaggattacaaaattgtgagcatattccaaaaacagctgggttcgctatatccgttgacacactcgtgcatgtcaccccaaccgatctctttgaattttatgctgagcacaagatcttacatgcggtgcacgccatgaccattcctgaagactatatgtatagccggcaaggacttctgaagcacaaagaaggccattggtatcattcaaacgatggtacgtggaccgttgagtttgttggcgagagtctgccctacacccagtccaaagcaactactgataaatacttaaccacgccacttttcgatctaggtgaattgatggtatactcaaaagtgtcaggatataaaggcgcacatttgatcatcgagcattttatcttgcctaaattagacattgagagacacctcatacaacatgtgacatggttcaatacaaatatggacaatatattcgtgatgataccagatattgacatggatagttctcttaccctcatgggcagagagccgtaccaactgaaaaaagtggtgatcaatatagctttttacgaacgtatcctcaatagattgatgcaagcttacacatgggactccacattatcatacgcagctgggttggtcggtcgggtgtatgcaaccaccagcggcctacaccaacgttgggaccttagcaatacgcaagtccgtgatcattgcctggttgcgtactggtcggtcaacagaattaatgaatcaattcgaccattactagaccaagcgaaccgtgatcgccgagcacctgacttcttaacgagtttgtgggaatctgtcaagaaatgggccgttgactttgggtcacaatttgacccatctggcagcagcattgtgcaagactttattcggatgaacaagggagatgttttacggctaacacaactgttcggagcagctagccggagtattgaaagccttaacctggccacacagatggtgcactcacgcaacattgttaagtggaattcagtggcatctggctatgccgccaattcagtcaagtataacattgacacgtggcgctccggtttacactcagtaccaaaagaccctacaacgtatgatctgctggtgaaagggaaactagtagatgttgggtcacgccaagtgtgtgcagccaacattaaatgtttccatgaccacagtgttgagcacgatcacataataccaagcaatctgctgaaggtcggcgcctgtgtgtgttgtggcgtgctcagttcattgatgccaaacaggtcatgtactatctgtagtgaacacccaccatgcactgggaggctagccaggtgtacacatgagcatgtgtacctcaatgatgagtgctgtggcagtgctaggtgctcatgtgttaaggacaaacaatgtagttgttgtgggctgccaagtattggtgtcaattgcaatgtgtgcaactttgaccctgctgccccaagcgtgaatgaattaaaattgggtaggaccacgtgtaccactgactttgagttcccaaaccaaatgcctaaggatacattcgatgatactactacaagtacggccatgcatactcaccaccaatccaacgtggcagcaaccgacaaaggagaaataatcaacaaggacactaccactcacaactccagcaataaatcatttagtgaagcaactaacccttggccgaccattgaaaccattaacaacataccagaaatgagctttgagaaccttgaatcgttaaaacctgggatggggcaaccaatcaccagcacaaacaatgagattgttaatcctatagtcgcagctgttgctgctgaaatgttatccgataataataccagtaccagtaatgctgctgatcaaaccatcaccgccagtccatccacgtctagcagcagtggtgttgacattagtggcctactaccacctgatcaggcaggtatggtaactccatcacttggccttcacgccccagtcatatccacggatcttgttaaatcctgtagcgtaactgacattagtaatagccctacaacatacttatcatcagtttccgtgatcattcgtggttgggcagacgttgctggtgatggcctatgtggtgcaaatgccctacatctagctaccaacatcaaccatgatgaaatcaagcaatggtttacaaatagcaccggtcacgcagactgggtcacaggggaagagattgccttgtgcgcaaacgcttatggtattaactgcatcattgtcaatgacagtctaagcacactgtatagggttaatcacaacaaccaggctgtatcaataatccacggttcagttataggtttgggcgcacactgggtaccaggctgcgttgatattaacctttatgcttcacttgatacgacccgggagcaaaagaatttttacgcacttctatcttaccttgctgacaagcagattagcacctccaacccgactagcgggtactgcatgaaatacgcctctttggatattgaaagcatactcacccttggtggtgaactcactgtaagcaatgacggtatagagctgttacaccgtggtagtgctgtcaagccaaccctagacgttaagaaggattcggttaaataccttctagggccgactggatcaggcaaaactacgacagcgcatcagctgcttggaaagaagacattaattatcacaccttcaaggtccacagtcattggcacggttgactacctcaacaagaacggcaccaaagcggcaggcagagctgatagtcaatggttcccagataatattgatatggctaagattaactcaaaccaagtgattctggtgacagttgacgccatgcacacagccctaacatcgggaaacaagccacatgcaatgtatctagactggaccgtctctaggtcagtggtgtgtgatgaggtgcaccagttaacacacaagtacctcacagtaatgacttatctaagtacagcgaacaccacatttgcttcagctacactgccaagcaatcccgttgacttacgctgccaacatgacacccttacacatttcgttagcccagatgatatagaggatgacattattgatgctgttaatgtgccaaacttcgttgacaacacagcagtgatagtaccatcagtcaaattgacttataccgagtcagccaaaaccggcacagccgctatcagttcttccacgcagtcacaatatgacttgagcaaagtaagtaaagcatgtgcgactgaatgcattaccactggcgtcactctaccaatgattaaccgagtaatagatagctcactacgcatagatgttgacataatggctaatccagattgggccaaaggtaggtaccacatagtgaataaacgcattatctcactaactgagcttattcaggcccgaggcagagttggccgagtatcccatggctattacaaagttggggcttttagccgctcaacacccttgtgcaacgtccaagagatactcatgagctgttatgctggcacaccgtgtagtacaaagcatttcaacttgtggcgctcagtacatcaatcagtgctaactacagctaacactcaattatcaatgctaactggcaacggccacaccgacgaccaagtggatagattgactagctggattgctgactatagtgatctgcttaatgcaaagaacaaaggccaccaaccagtgtttgttaaagataacgttactctagagagtgtgctatcaattgcgccaagtgtagttggaactaagactaggaatactagagttggatctgtgaaagcaaatatatctattgactttggtactctattgcctgaatcagctttcggtgaatacagtaagcgcaggtctggtgatgcagtgctttcactctcagctgataattttattgatctcgtgaatgacaccaatgaggagatctctcacaagctcatcaatgtattggcagcagatgttgtcaataccatcaatagtatccgcaactcactggtgtcatcacacaacagaaaattagccgattctactaaaggtcaattcccagttttcagctcaatgcaacaagcggaatcgcttcaagggagaaaagtaggcaataatgatattgtgggttacattaatgaacggactggcgcaggaatggtgtctcagtacaagaacatgcaaccacaacgtgggtacttttgtctaccaaacttcagcacgtcacactactacaagacagccactgaaattaacagcttgcgcggagttgacacccccataattcagaagttaaggtcaagtgttgcaatatcgggcccgcccggctcaggtaaaacttacgccatgttgaatgaacaccgcccggacttaattgtaacaaccagcaagtcgatgcttgacaaaaacaaaacttggcgtagcccagctcagctatcaggccattatagaagcataggagtggatgaaggtggcatcatggactttgtgacccttgtcactgtactttgccacacagacaaagtaattatgacttgtgatctggatcaattgccaagtaatcaagacttagctgtcagtgatctcattggtgaaacatctgcagccgcagccatattgaagtatggtagcgttgagacgttggggacatcaaggcggttcggtcctgccacatgccgactgcttggcctgactggaaacgtcgttgaaccatataataaaactaaaaccgataccatcacaggcagtgttgtcagccccagcaacaaagccgacatgtcagaaatactccaggaggtatcaccagatatcattattacttcaactaatgcactagcacgtgaagtccgatcatatgccaaccttgcggtttaccccatctcaaagtgccaaggaatagagggaaagtcggtcctcttgctcatccaaaaatttgaccagtcaaaattgactgactctgctttgtatgtcgctttgagtaggcactcggagaggttgactgtggtcgttgatttacctaacgcaccactattggatagattgaggatagatcatgttgccgcccaaagttacgctgacgctgccggcggcatgttgtgcctggctactcaaacgcggtggtggcttgcagacaggctggccatagcattgacgtcggaccatgcctggttagacatgattaacgcaccaccacttgagattaccaccgactgggagatgcgtgaatacatgctagctaatgctggcaaagcatacctgttaggcagggctgaatcttcaaggtatggcacatacgttctatcatattcggaatcagccaatgacgttgacgtctggaccttcgcatgtgataagaagaagtacacagtgccagtgatcaacggtatgactttacttgacataaaccggaggtaccttgagcagctgccattgcggcagctactgagaataatgagcatgtatgtactcagtaaactgaaaaccactggaacgaaagttggaatagccatcgctaaatggtttgagtctaacattagcacatgtgttaactgttattgttcagtcagacttcaaatggcagacggcatgccccaacctgattccactacagctgggggcgcggccaatatcctatctaacataattgacattcttttatgcataaaggatggggtaacgaaagccatacaggacatgcgggtaagtttgagtaaggttaggaagtattttgatggtgctatcgctggcaacaagctcaaagattatgtgacgaacacgctatatggaacatacatggacgggaccaacaaccagagagggaaagacccgtctggaggagccaacagtttgctagaggcattggtagacattataaagctggttggtaagaaagttgtcggctcagtaatggacttatacaattttgtaatcaaattaatatggcctgcatcgccccaaacaagtggtgataacggtagctatgaaatggacgttatgaagttaactcgccatggtccagctgacgcatctatcaagcgcaagccaactacgagattgtacaagccaatgtctttgtatgaagtcagcaactttaatggtgtagaagtgatggaactagagctgtccgagatcaaagatgaatttgagttattgttcgactcaatccatgggccaacctcaccaccagtcatccctgttgggctatcatcgaatattggagcagaggttgttgaaacgttgataaacaatactgggaaatcagttagatggtcagttgccgataagccaagtgaatcatccgaggacagtgatagcgactcaaacactgagaggttacatgtacaaaatgttagctccagcgtgactgacaaccaacagcagaattgcttgctgcgtaaaccactacctgtgcctgacaacctttgcaacccaaagtcagtatctcgccaagtagctgaaaaccccacacgtggtgagatcaacagcagtgaattaagcaatgctgataaccacgacggggaagagccacaaagcccatccatcgtaccagcagcaaacggtcaaagtaatccattagagtcgcaaccaaccgataactgtcaaccagatggccacattgattacgagttggccagcgattataatgattcatcactagtagggaaatgtaagaagtgtgttggtcacacggtggaagccactactatcaagactaagctcaggttcaacacttttaagttgaatcttctcgggcgcatggctgccaaacagcaggctgatggctcaatatcagggaaaatcaacctcggttacttcaatgtgcagttcaatgcaagcccctgttgcaatggcaaataccacgtgcacgcaagcaatagcaatagcacattagccgatgctatcttacagccagtcccaagtggatacattgtatttgtcaaaccaagcgatgacgacattgacattgggcaattaaatgctgcagtcaaagcaatctctgcgatgggtggtgacaacaatgacagcattatgcaattgttacttggtgttttcaaagcgacaagtaaatatgtgagtaaagtcgtcaactttggtagatggaaggttgaagcaatcttgggggcctgtgagttaagtacagtacagttgccaactaatgtagttgattcatatcgagccttagcctcagcgcttaacaggcattacatgctgaggaaccatgttgagttgaccaccaatggtggcaccaccctggctacgatcacaggtaccaccactgatgggtgcagcaacaacaatctcttcattgccatttatggattcggtctgaccacgacagcttgcattttcacccgcgattctaggctgctaaaccatatcacacgtgccataacaagaacatttaaaacaaggacagggccggagtcagcactccatcctgaggtgggaggaagtgccctagctacgttcaggggcttgggccttgatattagcaaagtggtacaaacattagataaccttgatactgatgagatagtcaactggataacttcaaacccattggcagccattttcaacttacagaaccaggatacccacacgtcaatcaagcaatcaattgaggactacaacatgatgggaaaattggtaaccattaacatgcctaaagttgagcgccaaaccatcgcgttttgcataccaagcggccatgggaaaaccacaacagttgcgcgcatcaggcgtgagcacccagagtaccaagtgatagatattgatgaagtccaagagcaagcgtcaatactaaccgattcttttgacaacaaaatgaaatcatataagcgcaaacttgaactagagcttaggaagtcaaaagtgcataaacatgcaatattttgccacatgccaggagtagccccagttgactgcaaacaggtatgcattgtcaacaagttggccaccataccatttgatagaatatggtctaaacaaaacttagagaatttgataagcaagtccaacacaatacattatgtagatgggttggacgatatgtacaatagttgcatcaaatatattaacaacacctacagcggggatatcgtgtttgaggagaataaggaattaattgacaacatcaacaacatactcggggattcatttgttagggatcaaccttatgtggatgacatcttcacgatgccacaagggccacgcgacagattgtcgtacaaagagaacaacattggttcagggcaacagcgcatcttcgttactggcaatcatgttgaagtagcacggccgacaatccagaacatgccttctagcctacacaatgcaatcacaacaagactaatgggacgggtgaaacaccgcactgagcagatcagcattccggagtaccacgcaagcctcaaaaaactgctaaacaagaattgtgataagctgttagcagcatatgagttagatacaatcagcttgtcagtgaaagctgtgctggattggttgattaacaaaggaaataaacttgaactagtgacaaacatgctaaaaaatgtaatacgcgatgagcatgctactgacccagccaatataaacgtgcattacaaagtggaaacgctactcaaagagcaagtgaacgatgtgcttgaccaagttggccgagtgatagtgtggaataaccaaaacattaatatgtttatatgcccaataatcaatgaagccaaggccaggttcaagactctattaagacctaacgttatttatacagatgggatggcaatagctgagctgaatcactcactacggcagtatgaaggaaaatatctactagagatggacctatcaaagcaagaccgtcagactgataagccaattctgcaatacgaatggtggctcatggaaaggctgggtgtgtcacatgacgtagttgattatatgacgtcatttatgccaacattcaggataaaggggagtaacggcgaatcagcaactctgccagcaatacactttagtggcggtgctatgactagcttaggcaatgaaatacgcaatctattgctgctgtccgattgtgtttcatcatcatatgtcgcaatatatacactaggggatgatagtttagttatcatgaatgttgagccaaatttacccctgtacaataggctatgccggaccaggcacaatgttgttaacactgccacatggagcaaaacaacggccacattcctacaattaattattgcccgagacgttaacaacaacttttacgcctgccacaatgtaagccggctgcgtgagaaaatagcgtattccacataccccaactggagctcagactggaaagcaaagtatgcatcatacctaatgatgataggggaaactaaattgacgcatgccgctatggcatactgtgggttcacagtatttcctaatttaggcacgactatgagtgaacgactgcatgccaatagtctacacaatggaaccaatgaagcagacgtggttaacacaatatcagatattgtccacatgaaggacgtgcagtcagttgaagttaaactggaaatacccatgttattaccatacaacaaactagggttgggaagaaaaacggttgggccctacaaggaatcacataacaccctcatccaaaacgtactacagcaactccaggagtactaa

SEQ ID NO: 1237 - DNA, 13920 bp, Phytophthora endornavirus 2
  source 1..13920: mol_type = other DNA
atgtcagacgattcttggttcgggctattggttcaaaaatacaatgagaagaatcacatctgtgatgaagtcagccccttcatgggggatggaattgaccctgctttgcacaaagtcatgcgtcacatcaagaagaagtacaataacagcatgatggaaatgtggaaggagtactgtgcgagcaacaccccctacagacccaaattagttagccttggaggacaagtttacaagattagggacaatgtgataggtaccaaggaccctatctacaaatgctccttctgtaatgccctcaactacagtgacgatgttgccaatgatctatgtggatgctgtctgggttctctagacattggcctggaatccaccctgaaaaacactagtcttatgcgcatccttaccagtctggaaatgatggaacatggatcaaatgaactattccaattaatgcaatctggttacaccgatggtggtctattaagtgacgatgcagaattcatgcgagtcctttatgagcacgacctaagacttgtgcgcaacgcaatgacgagaatgactataagaatggcgaactacgatcgcggaatttcccgagaacagttgtcagaactccagcagcatttcccagatgttgtttggcgcgtgagccccaagtacacaaccaagccgccaatgacgtcaagcgaagtacaagggcaccttgcggtgatcaggaccatgactcccagctctcacaccttactgatcagagatcaacacaactggaccggagcgagtactgagttgatcacagacaatcccgtatgcgaggacggcaaccactccatcagcaactgttcctgcttcaacgatgccaacacagtcattgtatttgtgggactgcccggggaggacgcatcacgcgtggttcgagagtgccactgcaacttcaacaatcaggttgtacacctcatttctatcctacccaatggtcagcaccacggtgatataggtgtaaacgaagagttggagatgaatgtggatggggacagcctattgtgcagccccaatcatagcagtgtgacctgggagtgctcatcccacgaattggtggtttggaccactaagtcaatggtaatttacggggacatgcacgtgaagtgtttcactatggcagacacctcccacacgacttggcgcaccttgaatttaacgccgaacattggttcagacagtcaacccactgggctgacgcacttgcaccccaagaatgttaccatgcaggtcccgagagtgaacaaacaggggttattgccgcaagccggcatcccagcatttacatttgagacggtggaggtcaacctgcctctactgagagcgttgaacaaccgcaacatgaatggcaaggtgacgcatcaaactctggtggagtatggcattgccatggcgcactctaaatacaccactatctctcgcaccattaagaagtcaatcaactaccaaatgattttggaccacgccatgttgagtgtaatcatgatgtcgttagtggcggccaacaccaatctaattcacaccacgctcgcatcagctgacgccaagcgcaatttaatgcacggagtggtgggagttgggatcaccactatgctagaaagacttttgaagatggtacaagacaacgtagaggaagtgaatgtaacaaagtggttagagtcattgagcgattatgagttgaacacgttgcgtgggcttcacaatgaacttctcggcttagctcacaacgactactgtccactgagtgatgtggaagacaacacagagacgcgtgacactgaaattacgggcatgtcaccaacaccaaatgtgtgcgctcaccactctaccgattgcaatcacaacatgacgggccccaagtgcatctgttgcaacatctacagcaaggacaaatcttcaaattactgcgcgtgctgcggcaaggggaaaaagtgcaagggcgcacacgcatgcaaccacacttgcgagcctatgaacatgcacaactgcagcgaagactgtcagcatctgaagaagccttgtccttgctgtgagatagacacatgcttggacatttgtccagtttgtaatgccagcaacttagcatgggttagtgaccaggaaccccttgtcgaggaagccaaggcgttcaagggcaaaccgcacggagaggcttcacagcacaagtccacagagaagatgaacaaggaaatgagaaacatcgcacgtgaacgacaggtgcgcgagcgtcgcaagactaaactggctgaagaccgtgagagatcgattaagagcaccgatgagcacctacggtcgacgggagagttggagcagggacatgaagagctcgagcgcgctgctgctgacactcatcgcatcgccatcggggataacagaataatgattgatggattggcggtggaatggtacgcaccagacactcccagtgaagtttgggtgcgcgacataatgaagaaactggataacgatgttgaatggttggagtgtgtttctaacaaagacacgaacggcatggctgggatattgatggccgagtttgacgagggggcacccccggtagagcccaaagacgacccgatgcgcattgaaggcatcttgcatccagaggccagtgtttccgacatgcctgcagaagtagaggccatcaaattagacaaagactggtccaacatcaaattgcacgcaggaaatggaattctaagcatggtgatgtacggacaagtcggggcttgggaacgtcatttggtgcaagcaattgacaatggtccgaaccctggaaagatcaacctcagctacatggtagagggggagtggtcagtggacccgaaaaacatacaactcaccagcctgatagataaccctggatggatggacaagtgcggattttacgcaattgaaactagtctgggcgacaatgtagaattagaagaactggagatcctaagtaaaaaggacagctggttcacagcggaagacttgtctttatacatgtgcgacgtaggcgccaaccatgttatactggtggaggacaggtgcactattgtgtgtgtggacgacaccgacgaggagtacaccctactaatccacaattccgcagtatccgaacaacacaaccattggttaactggaacagggaaacaaattgggccatgctgcccttggcctaatatctcagggaccaccacagctgcggagatagaaagctgcctattcaaccaccgcatggactcgaacgccaaacgatttgatgacttaagcatgaatgaccgaaaggtgctggcagcggatttggtggaatttgccagcagaactaaagtacagaacaccgatttcgagcaagtttggcaagtcaagtccagccacacaggaaaagtactcaccaacaatgtgatcggatcccaccgaccccgtgacggactcttctgcctaaagattcctgagaaattcacgcatctggtcacattactaactctgcccagcgatacagctatgttagataatgaaatgcaattagaacacaacatgcctgtggacatccctgctgtgttcgaccaaattcaaacgcaagagactagagaatgcataaagtccctaattcagctggatatttgcggcactagtcgcactgacgattacagcaacagctataccacggtctgggagaccgtgaaggtggtaaacacgaggagcggcacgacaaaactcgtgggtatcaagccaacgtgcaaaacaggcgacatattgaggtgcaacaaactcctcggcggagacaagtgccaattgatcaaacgaggtgggggctacattatatcagggcgcatcaacccgcacgtcatgcatgcaaaaattatgtatgccaaggtaagtgccgccagtatagccatgaaacttgagtccttatggcacacaatgatggacaccgctcacacaaggtacctgttggagcacgcacaggtgctgctggcaccacccggatggggcaagtccacccgtattgtcaacacgagtgacctcgatagcacagtcgtgtgtatgacatcagcgtcacgccacaacctgatcaatcgtggcgtaaaggcaagatacacaatatctgccgagcgggccaaactcgagaaggtgacaacgagaaaactgataattgatgaggccacaatgttacagtggacagacgtgcattgtatgataactgaggacgtggaagaattgtacttgtacggtgacaggcaccaaattggggttgtggacatgtcaagttcttcaggagtgcgaaacgaccgcaacatcacgcagtacaccactaatgtggaaacaccctccggcacttaccgcatcggcaacccactatgcgccgaactacgtaagttgtaccccgagatgattgcccttggcacacatcaaacaacgttcaacgtcacacgtttggacgaccttacgggagacgaagtgcgagagctggtaagcagagtcaaacccggaatcattctcactttttaccaatccacgaaaaaccgagtgaaccgcatgcttcggggctccatccccgtcagcactatccacagttatcagggatgtgagagtagtagggttatggtgttccagcaccaccctcgcggaatccgtgcggggctgcacacttccccggattactgtctctcggcagccacacgaccaatcaatcacttggaatgggtgacggtaggcacatctcatggtggcacatcgctcgtggatttaattagcggaggagactcaactgccggtggtgctgatagaacgggcctacctccagcagtgcagaacctagcatccatgttcaacaattggatcctgactaccaccaatagaccaggagacatagaaaaacccgctcacccttcaacatacattgatgtcgtgagcaacttgctatctggagatgagatgaacagatctacggaagctggaaaattcatagtacttgaatggtaccctccgatgtcagacttcctgaacgacaaccgacccaaacctattggattagggttcgcatcaaatgtactcggacgtcacaagattacggtcacccccaaaaaggtataccacatcgaatacgctcccgcactgggaggagattatgaatcgctggcccaaatgttgcaggagacgcaccacacgatcagaggaacagaagccaacgctgagacgcaaccctccactgaagacagccaccccgctgcggttgtggaaagccccccaactacaaatgtttcggaagtgcagagagagataaacttcgagcaagtcgatcgaaaatctttattaatgcaaagcaacttcataattgatcacaatgcgtggccaaaaatgtttgaggtattcaacgattacaatctacgcacagacatgaccgctcaagagggtggaatcagagcccatgtgcacggaggtggcgccgatgtgttaatcgagcaacgtgacaccacagtgagtgtgacgttgaattgggtcgccagccttggactaatggtaaagacagcccaagagcaggcgctgcaaaccctggccaacaccactcaagcgctggtgacggacgtaaaaactcataagacgtatcagcccaccctagcatctactcaccagcaagagcttgccgatttaacgtattctggcagaactggatcacaacgatccacagtaccaatattggaatctaacgtagaatcaatcccagtcatgtctgtcgcacgtgatgaccacgaaaatgacgaagacgagttttacgatgcattagagtggaaggccgacctggtggaagatgcaactgctattatcacagacagtcagggaaatcagaagagccacttactggtcgacttcccgtcatcccacttgaagctactaaaggtgacagacgacaatatagccgccctaacgaccatggtagtttacgtaccgtggagacagacaattcgcattcacaacctcagccacatcgtgcaattcttccaattcggacgctgcgacttcatcctgaatgtgatgagtgaacctgtatctgtgagtgtccaccatggatgctctatgtgttgcggcatccggttcatgacctgtgacagcgtcatgacaattaacgagaattactacaataagaataatcgtcgtgtgacattccaaggattgtgggagtacagtgcgccgttactgtctattagtgaacacttcctaggacgaaggagcactggtgagatcttccacatggtgaacccttcttacatagatgagttgaccccgttagactgtgtgagtgacctcaacttggacagcatctcaatgtttggcgacattctgaaagacagattgaccactgccgcactcggaaaattacacggcattagcggatacgcctattatgccagggagaacgaggtcaccgtacacaaagcttgtcaacgtatggtaagtaacggcttgctgcctgacaatgtcacatctctctacaagcatattaatactgtcaatgccctgcatccagccacagttagaggggtgcgagtgtggtgtatcccaaccgacactcatactgtgatatacaatcccaatcacgcggatctccaatacctgcaacccggcaccaaggtaatcacgtctgtgagatccatgtgcaagatcattcagaatctggagcatttgcgtatatccaacattgccaagattaaacgcgctctgggtttgcacaactttgatgcgggaggtgagatgtttgggcctgttgtgggtatgatgatggatatggacgagcacattggtaggaagactcctgtgcacaggttcatggcgaggaaggtggggatgctcaagatacaagcactgaagaatgaacaacgcaccttgtacctgcaccacgagctagtgacaaaatggaaaaatcacatggacaacttcgaccgattcttgtctgtccagggcatcaccttgccatcaccctcacctgactactgggacctgttggacaacagttggatgtggttctgtgccaacagaatcgccaatcaaagcgacttgcatttcactgtcaacttggcgttcatcgccaccaacggcgtgtgggaccaaaagtacttagatgcttcaccactagggttgtctagtgtgaaccatgccgaaaggttgcacatgctagcggagatggagcgggcccgcgatggatataagcgcgctgtgagtagtgaacgctcagacaaggattcacaattgtacaagcaccaacacctgacactgactaagatagaagctcaactgaagacaagaaatggacccatcgtgtacactgactgtagcaaatccaaattcaagatgagtcacatgaactttggtttgcatttggtttcaattctagcggagcctgagtccctggcacgagtggggctgtccctaaatggagttaaggtaattgagggactggtgttgcccgattcttttgctcgcagccacgaaccgttccacacagtaaccatggacaacgacaagaccagaattctcttcaatgattctccacgtgtgctagaagaggatacacggactcgtatggtcctgatgaccaaaccgtacattgaattgaatgggtcatattggagaatagaaatcgtcaacgagttttacaacgcttacattgtgaggttgattaacgaaaatgatgtggtcaagagatgtatcatcaaaccgcccacaccaatccagcggcatggagaggtagtgtacaacattcccagcgttgaaactgatccgcttaagatagttgccaatgcatcagttttctctcaccgccaggtgagcttagacgccaacgtgttggacaaattgaccctgcgttgcctgcgcgacaggtgttctttgaacgacctactaaactacgctcgcattatgggcaatgctgtgatgtactctaagcagttcaaggtcaataaacatcagttaaccactactgagttgcatgatcactgcatggtggcgttctacgaggctaaaaccgacttgctgatgtccaaaaccatcatgaagctttacgcagacttacgtgcaatcgatgagttcgatgtgagcaatggtcctgcctccataggaggtatgatgttatctcacgtgggaagacacatcgtagacaaaatttccaagatggccagcctacttcacatagacattgactttgacacagtgttgagtggtattgcaggagtggcgtctaacattgaccgcacaaagttattatccaaggccttgaaggatctgatgaattggcgtgtcaagagagtgtccttggcccctaggttcctggaattcaaccgtagaaccatcgagacacaagggttgcaattgaacactctccccgcggacaacgctgagtggttggggcgcacattcgctaagactgtatccaaagcgacgtctggggtagaactaccaacgtcgacaagtgaacgtagtatcactaagatgaccaaactgccggacaccagcagtggggcaatttcaaaacagctctacataattgtgtgttatggcaccttcggcgatttgtacccgttcatcaagatggcgaacgtgttgggaaaggtaactagcaactctgtgaccatcgtaacacacaacaacctgatagcagctggccaaaagctagtgtcaaacaatgtgagcctacacggtctgcgatctgggaatcaagccatgctcgactttctaactaatgcaaacaacgggtccatgactcccaacgtgttggatagctacatcaccttgaacagagaacttggaactttcttgtacgacgtgacggacactaacgtaaacataattgaaagccacttctctcgtgtgggcaaactcatggcctccatgaagggttggaagcacagtttcgtgagttgttttgacaccgtggcacaaaattctaagttcacgaacaaaccaaagaagacatggaaccaaatgttatccgtaggtatcatgtctgctgctgccatggccttgaactttagcgatagtgactggaatgatgttatgaagaagatgcgcgtcgagcaccaaaacatcgtcttgctgaagtatccaggccacactgatgttgagcccaccacgcacgtcagattgactggacccctagtaaacgtcaagaagaccaccgtagggcacaggaccgcccgtaagttggtgctgattacatttggatcggtcaacaccacggattccaaccgaaaagtcgcaatgtacagccacgctgccatcaagatcaaaccagatgagatcgttgtgcactgtagcaaactcgagaaaaatgtcctagaacgccagttaaattcggaggtcaccaagcatagcccatcaaccgccttgacttttgtggaacgatatgatgccagcctgtacagagattgccatgttttgatgatccatcatggaggcgcggggacgttctacacagcccggattttgggtttcggccaggtaatcgaccccttctatctagaccaattcgattggggcaatgtggcagaaaacgagggggttggaaaattgatgaaaccgcaggacgttttgtgctcttctgaaaaattgttgagtacagacatgtggaacacattggtcgccactgctgaaactaaggccataccggggtacagtgctgatttgcaagccgaaatggccgtgaatgctctacttaacatgttgcgtgttcacggcaaagaagaggaatgtgattgcaaactgtcacccagtgccgaggagcacggacaaattcaagtgggaaatgccattagaacttgtcttaagaattggtggcggactcaggtgttcaccgagaagactgagaaaggtgtggaaatttgttccggagtcataaacaatgtgtggaagactgctctgtcaagtcttgaaaaacactcgctgttggaacaaatttcaaaagaaacaggagaaactgataacaccacacccacaacgtcaatggcaccttcaagggtgaccacacacctgccagaggaagaaagtgatgaggaaactaaagaaaccgaaccccccgagaaccaaaatcaaaacaaggagatcgttggggaggagtgggaggaaatctcacgattggagcaaaaggcggcaccatctgaaacaacacccaaccttactaagaaggcaaagtctgcacagagacccacaaatgtccgtgaggaacccaaagacgcagacaccagcacgagaaccgacatcataagtttggaccacgtggtacgttgcgtcatgaggaccaagatgacacccgtggtgcctgggtggaaattcattgatgctgttggacgttttacgagcgaaaaaccaacaaacataagattcactttgaaggacacacacaatgacggtgcggggtgtggtttgaatgctgtcatggtaaacctatcgcggttcgggcagaaatttgcaaaagataagatgatcaacctgacagggaagattacatcacacaccgtaactgatcttgcgctatgttgtctgctaagcaatgccaacatggttgtggtgtcagagaatcaccccacgcgttggtttgtctacgacatcaactggattaccgtgaagatcatccaaatggaggtgaaaggtgtcggacatgctgaacctgctgaattggacgaacaggaaatggccactctgtggaagaatcgccgggagttccaagacgtcatgaacgtacgcaagctggccactgggcctgtttgtaaacgtctgggtgtgcccattattgccagtaattacggcccaacaaactgcttagaccatgttcatttaaccggaacccaggttgacacggtaaggaacaatgcacccataaaaattaccagcactggtgtgaagttgaaatccaagtgggtctatgacatggaggagctcacaggaaaacctgagtcacactggatatcacgcctgtccctaagtaacgtagggaaaatcatatcgcgccactcaaacccaataagggtgataaagggaagaaaacacaacaatggcattttgttggacggggctacaggatctgtcgttcgtggaggcacactagttctcgtgattggaatgagaggagcggtcgtaaccatggccaatcccattaaagacggagtgtggttacccataacacaaatggatgtgaaccctttgttcttcctgagcctaggcacaggggtgtaccccggcgcaacccaacatatcaagacagtcttgaaagcagacgaggaagtgaagacattcttgaacaatgcgtcgctgaaccgatgtcacgccttcggattgttcaacaatgttttccgagtgcaagcttctgatgctactgatgttatagtatcacagttcgatgacagaaagcaccacaattatgacgacagggaatttctagagaagttttcacgtgaccacatcatatacaccggaacagacgatgccaatttggccttaaactggattctaagcagtggcgtgtgtcacaggagaagcttagtgtcgggacacgtctccatggaggtaaccaccagggatcaggtgttgttacgcttattggctctggcgccgccgaattggaaggtggaggaagtgccatccaacataaatcaggaagggaacctcacgacttaccaagcccattatttcgatgcaaacatgacggaaggtgcttggttcgggttgtcagatttattgggaaagatgttgcaacctgatgggaactccaacgacgccgtgctcaggcgaacagtaccatgtgaaggagggttgacctttaccgcggtgctggatggtctgaaggccatttccgtccatccggcatctgatttgactctgaccatactgcaaagcaaagaggaagacgccaggtacaagttggaagtgatcaaagacgatcaagaggtactggagaaactacatgacttaggcaagttcgccagtgttgggcctctgatggccttgccgaacgggagcgtgctcgtgtatccgtttggttacataatcaatgtgcgcaacgtgtctggaggtaatgccatcgagaatgtattcgatctgagaggcgacgaggatgattcgcatggaacatccggatcgtcaccaccggctgacttttggtccacaaaagatcaactcagtaaaactgcaggtcaaatcatgggagctcacgactggtggcacatgactgataaaaccgtctctcaaacaacagcaactttacgggaagtggcaagtatcatgaatgtagacgcattgcaggatatgacattgttaccccttgcagaggataactttgtacaccgtccagcgagtttctggaacaacagaatttacttccactttaaggacgacggacaaacgttacagagttgcgatttaatgctggacgaagacatcaccagtgaagttcttgacttctggcttgaggacgatcttacggaccacaatgttgtgtatgggccgaagtcagatctaaaggtcacccaccaaaggaactatggtgcagtcaaaaccattgtgaagacaactctgacacgttatcctttgtattctcgcccagtcatgacaaaaatggccaaccaggaagtgaatgcaatcactggtcgcattggctcagtcactgaggtacgcaagtacaatcttgatgcaattaccgagggacgcaaattcgctcaagtgtattttaaagaagattgggcgtcagtagtcacacaatacagacaacagcctctgacgtttgacagtgagaaaacattgacgtggatagcgtctcgctctgatagcagcaaaatagccagggagttgagcactctgcttgatgagggattcattgtgaacgggctggacagggtcaacgtccatcttaagttggaatctttattgaaagatgaacccatcacctcatacaaggaacaacaggctaggactattgtgtggcaatgcaaggctatttgtgctatatacagccccatctttattgaagcgaaaaagcgcctgaaagaactgttcaaagagttcatcacttacacagatggattgacccccgcacagatcaatgacattcttgcaacacaggggacaacaaggtacttcctcgaggatgatttgacgaaacaagacagacaaacagaccaacaattgattgattgtgagtttgagatttacagatacttgggtgtgtctgaacttgttttgtcatcttggagaacggtccataataaatggaggttcaaaggcaagacgactcgtggcacttttgacgctcagcgccttacaggacaagtcaccactgctattggtaacgtaattataaatttgttagtgcacagacggttggttgagattcacagtgcatccatcaagcggatgttagtgttgggagatgacaacttgatgttcactaaccgagaaatcgacgcacgtgcattgcgtagaacggtggctgattactataacatgcaatcgaaagctgtgatgttcaccaagcatgggacgttctgttcacttgtagcttacaggtcggttcatggcatcattcaaatgggccccgactacgtccgactgcgacgacgattcgaagttacgaatggagtgtccgaagttgacgacatcaacattcagatgcgctccatgagttattgcgcgatgctaggtgcgataccggaagtggaaagactagtggcagagaaaggatggcccataacccttgttaattggtacgcacaagactgccttttgcaagctctggaggacaagtatagtatgtcccaggatcaaatcatgtccaatttacaggaattgttgtccatgatccgcactccccgcaaatacgaccacacggtcacagtattagtagaaaatcgttaa

SEQ ID NO: 1238 - DNA, 13593 bp, Phytophthora endornavirus 3
  source 1..13593: mol_type = other DNA
atgcaaagaaacaataaacactccggcaatcttgtacctatttgtaagtctttaggtgatggggcattaaaacgttacgtaaaatctacgttgattcccgacatgttgaacccgagtaacttacttggtgtcaagtacgcgttaaagactgggcaagcgaagtggttcatcaccagggaacaatttgaggaattgaagttgatctccatgttgtttggtggtagcttacaagatcaaagattgagtaaactccgaagtgttatgtaccaaacaaccagtattggtaaggaggtggtgccgggagaggttaactacttcgaggattggtacagatggttcaccggcaagtacaacaacagtatgtacgccatgtggtgccaataccaaagcagtcccacattgttgtgtgacagaatcattaagattactgccaagacgacaatgtttgttgactgtgaagagtgtgaggcctctgaggtggtggtttgtcccttctgtggtatgttaaatcatatgatggaagaagagaaaacccactgtggtgcttgctttggagacttagagtgggactttgagtgtggtccagagggagagcctatcacaaccaccatcatgaacttacttcagggacattacggtatggccatgttagaacaattatctttgagcaactacctagatttatcagcactatcagagtcaccggtcacaccggctattgttaatcatgacttaatgattatcaaacaattattatcgaggacaaggaatcaaatggttccaataccgtccaacgtgtctaagtcggaattgtcaagtatcaaatttgacctgggcacagatatgtgctgccctagacacccctgcctgaacggggctcgtaggacggttgctgaaatttcctggttggtcaacaacctgcggcaaggattgaagcatgagccacacaaccatgtcgttttagataaaatggatctattgagtagcgtggctctggatgaccagccttacgtgaccgtagatgacctgcattctctaacacgtgaggagtgggtcgaagtgaaacatttggtgctgattttgccgaatggacgagacatgaccgaagcactaaacaacaaatctgcgacctgccaagtgacgtgcatttctctcaacatggacgaggcatattataaagaagaatgggacgtggccaccgtggctcataccaattgggcctccccactatatagtagtgctacggttgagttcggaactgacgtaaaacagctacttagcggggagcggtacaccattcttgccagtgggaagatagtcattaacagtgtattacaacgcactaacatgctcgtcatgagtagcatcaagcaatccatgaaggtccctggtgaagtgcttggcaaaatcaaatcttgtgacctggaaaaggttggagaattcaccattcctattgtagatgtcaatgcattgctggggaaattgggagtccccgtgcttgaagagaagaccgtgtcgttggatagaacattcttgcgatatttaattaacaagaacttgctagggaacatgacctatgctgatctgttggattacgccattagtctgtgccactccagatacgtgttggacggaagggaaagaaacttcagccgcatttctgctgatgactgcagagtgcactgctatgtttgcattatgatttgccgtttaaataagtccgaaattcactcttatgtgagtcaattaggacctgacaatcaatttaagcagatgattagcgtgcttggaatgggtgccatgcaaggcctttggagcatactcatcgatacagctaaacagtacctgagctgcactatggaaactgctttgaccaaaactctcacctggatgaaaactttgagcaccaatgaattctatagcactgacatttgggaaaacattcgtgagtggacgttcaatgatgccaccgtaaagcaacaatacttcgtccgcagtgaatgggattctgtggagattgttgccaactgcgatcaccacaatgtcgagtgccatcacgactataatccgtttgaaatgatcgagcaggacctgtgcacatgttgcaagctcactgcgaggaaggagaattcaacgttgtgcgaatgttgttcaattagcacgaattgtcaccatgattgcgagcacttgtgcacaggtaaatctagccatgtttgtaaacccagctgcagccatgataagaagttgtgccggtgttgcaaggtggctacttgtttagatgtatgccccatatgcaatgaccacattccctgggtcgctcctataattggggtaaagaatgtcttagggaaaaagacgtccacacgatcttacgcacaaccagaaaccagcaagaaacctcacaacaaggtcactgtgccgcctaaggtgcacagggacacattcaagtgtcatggagtgacccttggtgaaaaaggatgcaactctaacgctctgaagactaataaggtgaagatagaggctgcattaagtaagattaccaagtccgagctggagatgtatgacgacgatattttagccaacttgggtttgtatctgttgcttgacgaacaactcattcaggagccggagttacctgacaagccgacactgggtgactacatgccggctaaaaccaccgatgaacatcaagtcaaaccgcatgacgctggagaggaatcactgagtgacgcagagatatcacaaacttctttgtcaactgaccccactattcacaagtggctcatgaatttgtcaccagtgttgagaaggacttgtgtagatggaatgttgaagtgttgggggtctcttgtggaggagtatcaatcaagtgacgaaatcaaaccgggtgcaggtcatgtactattttgtccggagggcactacgtacctagacactgtggactggatttccattgtaaatgaagttgaaattgatggagatgacaatctttgtggttaccacgctttgaaaactagtgttccaacatgtagtttgagagatttgcgtgaaatgtctaacaaagagtgttggttcagctcttctgatttggaacggtatactaaatccatagatgtgaaccttattattttgaaagattctcaagtgactatctttaaccatgatagtttcaatactgaatatgcactattgatccatcacggtgacccgacggctggacactggaactctgcaagtttcatccaaaataagcctttgccgaagttgccagactgggttggatacactgacaatcaatacatggaaatgtggttgagagcgaggggattgccagaaaccacgctctttgacgacttgacgattgatgacagagtgagattcactcatagtcaggtcaatgaggaggagaagttgagtacgaaaacaatcaacgacagcctaattgctgaatgggacggcgtcacctacaagctgactagcaaatcgcaaagcggtaacaacattcgaaaaggcaatgttaacttgagtattcctgaggagttcaaggatagcttgatgctggtcaacatggaagtcaatcagatagagacaagttttgagttcaaccaaccacactcttactcgtctgacattccggatgatgccacccaacgtatcaagcaagaggtgagggaagtcttcaaaaccattgttcaattgggtgtgtgcggaacgaaacatctacctaggaaaccaattggttattatgacaacgtgatcaagtcgaatgtaaaatatttgaaggacaatgtatgcaggtgcagagtcagtaaggacaacattaaaactggtgacactatttgcatccaaaacaaagacaagtctttttcgattaagagaatcgtgcgtacagggaagtggatgctgtttaaccataagatccccagcaagaggtctcctgtgaaataccacgaaccacgcacttctttgaccagtcagttgctaaaattatccaacttagtaaggtgcaagactagcactgcagactttaaatccttgttgaagagtagcaaggccattttggccgtgcctggctgggggaaatctactcgcatagcaagtcaaatggatgatgacaccacagtcgtgtgcgtcaccagtgaggcagtcagaaatttgagagagatgggggtccccacaaaacaagtgacttctgtagagcgagcatgtgacgacttagtgagtacaaagaaattggtcattgatgaatgcacacaagttgattggttgagattgttcatgttgtgcgggccacaagttagtgagatccaaatgtacggagactccttacaaattggtgctgtagacttttccctgtcatcaggagagaggaccatttgttcatgtgagtcgtactgtggtaccgttgagcaacacaatgaaactcataggtttggcagccccttggtggatgagttgaagactctgaaccccaagctcaccagtgtagctgaacacagcaccacggtccgtgtggccaacctccctgacctggacattgaaagactgaccaacctggtgaaagaggaaaaaccgggagtggtactcaccttccaccagctaacaaagacaaatttacaaaaatcgctaggtaggtcttttaaagtggaattagtgcaggatgactttaagacggtacacagtttccaaggtcgtcaaaaagctcgagtgatggtcgtgcaacactttgtcactccgcaaggagttcacacagatagaagatacctcatgtccgcgaccacacgttgcaccaaccacctaacctgggtgacttgcggatctccgattacctcattgaagttagctgaccatttgaggaactctattttagtaggcggtggccatgtttcaattgctgatactgtaattcgcaggatcgaatccatatttgatgtggacaaattgttagttaacgtgagatcggccgtagattacatcattggaacttatgaagagaattctgacaaccagtttgaaattaagggtttgaacaactcaacagggaagtatgaagaagagagtcggtttaaattcactgtatggcctgatgacgacagactgaccaagtacaataagttgatcaaaattacagagtgtaaggaattaaccaatgaggtggagccgacggttgagatcttggatgaagaagatagatccaattattacgaacccctccctgagtgggaaggtggtttatgctacggagaaaagactattttatacgtgggccaaactttgcccaccgtcctgttgcctctcacattcaccacaaagttcggcattctgaagttatatcaggaagatggcgggatatttgcagaccttgtgacgttagggaagacatggaaagcgcaatggctcccagaagtggaaggttttgatttatctggactcaatagaatggctatctggtccctgaaacagatcctgcgattaatttcagtaacacatactctacctggctctattaacttgcaagtcaaacaggtggatttggtaaaccttggagagatctttgatgttgatgaagtcagccgtgccgctaacatgatggatgacactgaacacgaggcaaaatggtcatacaagagaccaagaggactggcccgcatcaacactatcaaaaacggcgaagtggaaaatgatctggggttgtttgccataatggatgtgtcaggagtcagtgacgaagcagtttactctgttaagttgtcgatgactattacgaattacgcgagacttagcttcttggctgacatatcccatcgattctgcggaatggtgaccccggcttgcattgaaacaccttacgggtgggtcgacataataatccagaacggttgcaacccatgcgctggcttaatgatggtcagtgataaggcatggtgggtcatcgataacgactaccagcaccgcggggctcgcagagtccagttcaatgaactggctattaacaactatgcaatcatgtatatggttaaaacactgaagttggaacactgttttgcggatgctgttgaccaggacgttcaccaacaagcatattactctgtgtcagcttttggagatgaattctgggagagcgacacaccgttaattgactttacagaatttgtattggatagaattaaaaatctgaccgtttccactttgagcaatcgttcgtttaagtaccacaactacacagaagaaaacaataagtggttggagaacgaacgtgagtacctggctcaatttggcattgtcatgttctggtgcagttttgacgagttatcccctttgaatggatccattatggttggacagactctcgacggtgaacctgtgtttacgctccgagtagatgaatttttattcgtatgcgactgtgatggaactgctgacaaattggatgattttgttgagattctgaaggtaaatatgaacaccttgttgtttgagagtttcaaattgggtgcaaaactccgaaagaacacgatcacttcactgttgagatcagccaacaacgcaatcttcggtggtggagacttggaacaaggtctaattttagacctggaccaacataaattccataagactgccgtgtacagtcacctgagccagcgacttggagaggtgaagctgagacaaagtgcattggtgagaagacccttttaccatggaaggatagtaagtcaagagtgcaggtcgcaaatcatgaattgtctacgcgctggagtcgttgttgactgtccaaccgtcagagcaacctcaacgggctcagaattggttagcttaattatggctcaccaattgaatgtgccaatcacactagtgctaaagaatccactgttgttgataagcaacagtttgtggcattgccaggctctatccttgctggaggtgatgctgaattgcacagtggcttcggatagacatgagtttatggaagtgtgtggggcaaccagtaagaaattgatgcgatcactagatagttacatggcctcaaacaaaattaaggaggctactcaactgagagctgtcttggctaaattgcaggtaacgcaaagatttggagctacgggtggtaacagtctgttaaaagacattaactcccaatcaaaaatcatgtgcgtctcacacatactactatcagaacccaagagtcttgaggcaacctggaaatgtgacaccaacaagattattgtcatagtacccggtgttcatacaggcggctcgaactggtacagagtgtccgatgcggaaggcgagagtatgatcgtcaccgaagaaggagatgaaaggggcataacggtgtcgcgttcacacatggtcaaccttatgaaccaggacaccataaacttgtacgggcaccctaggtcaataaaggtgattggaagtttgttagactacctaatttatgaatgcatcccaattgaatcatctcgcggtatattacgtaaatactggattagacaccccttgtgtgagatggtgagaatcccccttcttaccacaaacttaaccggagccttacaggacaagcgactaattaaatgggtcaatttaagatgtgaccctagcattatcaggcgactagagattagatgtaacaggccaaacacaacatttaaagacctatgtgaatatggaagaacgcttttacactcgagagactactctaggctcggtagttgggatgccgttaaaatcgatggctacagcatgttacagcattgtcaatatgcttactacacttctaagaacggagacaagtcaattcgcgggatcctgcgtatccttgacgtcgccatgggcggcgagaaagatatgccccttatcaactggctgcggcaactcggattgacgaaggtgttagaccaatcgctatctctatacaacagaattatgcaagaaactggtttaaacattagcttgtcacagaccggggctgaattgtgtggtatcgtagaagcgctgagtcagcgtagtgattgtgaaaccgccatagaagaggtcttaaccgagtacatgcccacgcaccataagagggaggtgacatttatggtgaagtataaggaggctacaaaaacaaagggagccataggtcgactgtgtggccgagtggcgagtgccctcattcaggaattctgggaagggggtgcagctcagcctaagtcacgcgagacgccagagcggtcccttgaatcccaagagaccgaaggaaaaaacaccccaagtgatccggagcccaaggacacaattatcgaacacagcagtcaacctgaaactgaccagcagagtacagatctctctgaaccgagtcagatgaataacctattaatggtaagccaggggacgaggggggacgtcgagcctctggagaatctcgtaaattacttccaaacgaaatttgacaagattttcgtactgattaaccgaggtaatgaagaggcggtaaagtttccggaggaggtacaaatcctgtactttaacatggatggatctgatttagctgcactgacttgtgacgacagtgctggtggtatcaaacagacgttgagtgcattggaaaaaatggtatcaagtattacaactgcttacgaccagggtgcatctttagaaggcatttctctaattgcagggaccagtcacactttcattggtcctttgttaagcaaacactatggggtaccgtttttggagatacaattattcccatggccatacaactctcagagaacgggagagatgttggctaacagaattgtttccagagttctggaagctgtacctgaaggcgtgagccatttatcatcaaggaaagccagaccgagaaacgtattgcttatgtatcctcctgccgcattgtctgagatagaccacaatattggcaacagcgtcagggtattgcgaaaagactacaccagagtatcgggatctcaccgtggaaagagatgcttgatcaccatggggtcgatcaccggtagtgaggcattagcgagatacgaaagcggtgtgttttgggctattgatgcagggttcaaagatattatgttggtagggcaacagttcagagaccttcgtgcccaaaaccagttgctaaaattctcatatctacaacgaactgccgaaagtagaggtgtaagtcacttcacgatgacaacttatgagaactataaggaggtcgtgggacctgaggttgtagtaattcaccacggaggtgctggtaccacaaactacatgtgcagattgaacgccaagcaaataataatgccaatttttaatgaccaatggtattgggcatccttactgtcaagtcacaagatggctgtgttttgcatcccagcttccttacctagtgtcaggatgtcaacggtcgatggtttgcgtccctgtgcgatttggtggcaaaatctgaaccacaaatacatgtcgcagacaagcattgctatgaatgaactgctttcatgggttagtaatcaaggaccgtccgcagatcacctcacattttacccatatttcaaggaagccgcattgtctatgctgtctcggggcagcacagctttgacagcaattggacctgtgaacttagcgtgccaagtaattaattatttatgcaaacatgtaagcatgcagttggataccgatgatgtccctccgcctttaattgaagatgatgtggaggaacaaactgactcagggaagagcggagacaatacctcaactgagcacaaagacctcacccctgtggctgacgcagtggacttgacagaaccggaggaaagtgggagtcggcacggtccgggaaagcctgaccctgagaaagttgaagaatccaaggagagtggagagactatagaggtggaacattttgacgagtcggagaaattagaaagtgttgaggaaacttttaagagtcatctgagctctaagcggtcgggagtggtcctcacttcactaagcaaaccccccctatatattggagaggtcctggattggaacacgttaattgagttacacgaacagaaccttccgaatagctatgacacccaacacttgaagacggtcgggccgtatactcacagcagattacttggaaagaagcttgagaatgtaaccacactatatgaccccaaaactagtgaggaaggtacttgtgtgtacgactgtttgaagtattatctgaggaacgataaaggtggggtgctgaaaacgtggtccgttttgatgcgctcccggacttgggccactttaccggatctgatcgccttctctctgctagctagggtaaagctcatcttggtcagggatgaagacactcttatagtgaacaacaagtgtgccatgtacatgtcaatgaggttgacgcaaattagcgggcttggacattgttcttgcgtttcaatcgattggtcagaggttgaggcacaatcctggattggccaggaaaagttcatcaatgctgcactagtgacgaaaatgcagagatgtcccaagaacaacatgattgttttgggtggccataactgctcaaaccacagccacatctcgaagaagacattgcaggtcttatccaacgccgtagatgtgcacacggaaaatgatcaagtcaatgattggattaaaacgtgcagtatggtctcgggtaagacggtcaaagacttaggtgcgcgtttgagtggtagcaattggagacacttaatttttagaaggaaagtacagatagcgacaaaatgggaccacaattacacgaatgccatttcttgggaccccaataactgtggatttagacctggagatctcctatgtgcggctagtgggaatggctgttcggttggagtcctgttaaataggtcgcacgattacttgttgccagtaagtgatacggttggcccagttgagtttgtgttatccctgagcatggacctgaacagtgtcaagaatgtggttagcaaagtgacaaagactgttggagttgacaaagccgtataccttaatcacgcctctatgaaatattgtcagtccattggtctctttcatggagacggactagtggtgagcagtgacgcgacttttgataaattagtcattagttcctttgacaatagaccgcaccacttatccaacgaaagagaagtagtcaaaaattgtccggaggaaaagattgtggtcgttagtgaattctccagggctgtaaccattaactgggtgaagagtgcaacacatcttcgctgttcaatttggcatggtaacttattcatagaggttgaatccgaggacagtgtactactgagtttgctagattacatcagtcagagaatcgaggtgggtcacaactcatatagatggcccgtgacagggtctgaagaattggttttgagaattgtggacactgtaagattgattgatacagaacttgttgttggagaaaataaccttgtatctttgaagagactgcaatttaggaaaggtgctaaccctgttaaagagttgaaaaagtacttgattgggcagaatttgtccgcggagggggaaattgacattcaagaactagacaccttcctttgcaccccgcccgaccaattgaccacaagtaactcaacccaggacctcgcagaatggctgaatagtgatcgacgtctgacaaaatttcgtttcgattctttgtcaattgttaagaacacagaaatcatgtatatggtggggcctttacttatcaagcgaaagaaattaattgaaaaattggagttggtaggtggacacttgaagaaaaccgtaccgtctctgaattggcgaaaaatgcaggaccacgtcaatgctatgaatatggcagccggagtgaagcatggatttaagatttcccaaatccagccggatgttacagaaagtaggatggtcactttggagaagatgggaatcactgatacacttaacaacctgtctcacatgatccgggcacctgacatggacaacgttgagagtcatatgttagtggacaactggctggacaatgtgtgtgcagaattcaacgacctgatcgtccctgagcaacttgtttcttcataccttgatagagaaccaagtcgtggagcgattcaagaaatacccattcacgtcagagatatgtgggatgatacttccatgttggactggaacactagctatgcaccaagtaatgatttacgtctcaaagcaagcatgcccactggaaagcgcagaaccgagaggaaagctatcatgacaaaataccccattgagtcgagggtcgtgctcactaaagccgctaaccaggaattcaacgcattgacaggccgtgtgggtaacgctcaggtgattagaaaatacaacttaaacgtggagtacgaggtgaagtcaatctgtcagacttactttaaaccagggtggatggtgaaagcgagggagtacagaggcaacccagctagccctgaaccacaagccatcttgtcgtggttggctgagaagccagactgtatcaaaatcggtgaagagttgaagatgtacatggaagacgggtttttgactcaccccatctctgatatcaacgttcacatcaaactcgagagtttattgaaagacgacccagtgactgtcaatgaagccttaaaagcgcgagtaatcctatggcaagccaagggaatctgcgcaatgttcagtagcaccttcctggagatcaaaaagaggctcaagtcactcttgcgagacgaagtggtgtatacagatggaatgcagccctctgagattagtgcatgcctggcaagcgttgacacattcacgagtctggttgaagacgacctgactagacaggacagtcagactgacaagcaaacaattgacgttgaatttggtatttatgacgtgtgcggattggatcgcaatataagtgcggtgtggaggagagtgcacaaaatgtggagattcaaaggtaaggacacccgtggagtatggaaagaaatgagactgaccggtcaagccacgaccgccctgggcaatgcagtggtcaacttggccgtgcactggagactagtcgccagattgggttcttctttgaagaaatttctgcttctgggagatgacagcctcttcattaacaccacaaatattgacgccacttctttacgaagaaacatagctgactattacaacatgaaatctaaggctatggaattcaagaatcacggcactttctgtagtatggtggcttacaagaccgagagtgggtctgtcgggatgggtccggatttcgtacgactaaaacggcgtttcgaggtaccaaatggagtcagtcacgccagtcctgaaaacatattagccagaaaactgagctactgtatgatgctcggggctatctccccggttgtaaaattggtgaaggagatggagtggccaataacaccgacaatttggtacgactacggactgttggtgaattccctagtggaaaaatatgatatctccagtacagaagttgagtcatacttgagtagcctagtagattacctacgtagtgacacatactatgaggtggattttgaagtgattagccaaaggtaa

SEQ ID NO: 1239 - DNA, 18528 bp, Rhizoctonia solani endornavirus
  source 1..18528: mol_type = other DNA
atgcaacttcaagacacatatggacgggaaatactccgtcctttaacgcaatcagactcataccctgctgaatctgatggcgtatatcataaacgaaagcagggtaatcatgaatcaagtgaaattgagatacatgatgaaaaacaaaactacaaaacaacgctacatacaagcgaaaaccataacagaacagggaaatacataacacgtgttacaacaaaattctcaaaaatgaaaaacacagagaggaaaatcatacttgccacaatacatgacgaactcaccaatactaacaaagtaagaggacaattcaaactacagccaacaattaaactcgagcctgcaaatgagaaagaaaacacacaagaagattctaccacagaaatagcggagccagaaccacttaggtcaggcattttactagggggcagcaatgattgctggcttaagctaggcaccttcataccacacaagacgcttttctctatcttagatttggatgattcagacagtgaggatgacagtagagagcaataccccagcaaaaacaatggtgagattgaagctagagatttcaaacaaactataatagacgtgtacaatgaagggaaaatttacgtcccaaagaagaaaaaatatttaccactgaaaacttacgcacctgtgttcaacttggagatcacattcgtaggtcatgagaacttacatctagaaagctgtggaatgggaaccaaagaatatgaagtaacagagaacacgtacaacttacaagaactatacgatgtgttgacaaagtctgaagctgattacgatgaaatggatagaagattcttgtccagttccattgagagaacagcaccaattgcagacttagagaggcagatctacctaaggcactttaaccatcgcaagatgggcacaaaagccatcagagcgtttttggatgatcaaggcatgacaggtaaatccagcctgagagtggggacagccgagtgggaagaggccatgttacacgacatgcaattagtcagaagttcactcagcagattaagaacagaaatacatagaggggatgcaggattgacagatgatgaaatcagactactagaaagagacaccctcaatttaacaattgtgccgaagaaaactttgcccaacactcacgctttagcagccactagcagaaaaatcacagccatgatgatgagaaaactggtggtgagaagcaaattggtggacgtaggaggtgacccaactcaatacagattttacaatgaaccacatcacgtcatgcgtcccgtactaaaccatgcagacgtacaaagagcactaaccaaaccaatgaggtttaacgaacatggtagtgggtgcacacacaccctagccacttgcgactgcgttgcaggagaacaattcccgatattcgtggactcaatttacgacatagacatggaccaggttacgaattacatggcgaccaacaaaattgacaccttcatctacagccacagcttcaggggagtagacttgagcaagagacatggacaactgtatgataacaagagtgtgtacaaagtgttcaacaacggtgatttagtcacatcactcagtggagaaaccgtgagttacgtgaacaactacgagagcacagaaatgtgggtgtcagctaacgtgctagtttcaaacgggatatggagaatatacgatgtggctgctgttggcacacacgtgattaggatggcggttaggatggagaatgccgtgcagttctattccaacatggaattagccaccaaagatcaaccaataacaattaaaataccactatttgatatacatgcagcaacgcttttaaaatgggtggaccacacttttgaagaagcgagatttttgaattctttattagaccgaggtatgagcggggacataagcttagacaccatgttagaatttgcccacgcaattgctttaactaaaatttcgtcgcatgacaggacgttctctttgatgagattgacagccaaagattgtcggtatggtgcttgggtggcattcttgtacagcaggcgcagaacacatgatataaacgatctggtaatgaatttaacagataggttgtccacgaagtatttgacaaggaccatgctggacatagggctgcccctgatgcaagagctgggtagcaagtggttggctgacaagctaccatcattgttcaaaaacactgtcaaaaacataacaaataaatcacaattgatggcaggtggcaaagagtttgagcagttgtgggataatctagacacagtaacacaaaccaagcacagcacaaaaatggatatcaggtacaaaccaggggaatttttatcattctgccagcattcccacgaaagttgccaacatgacgggcccatgacatgctcgtgttgcaagaagccagcaagcaaagacttgtgtgattgttgtgacaatgcatgcaagcataaatgccaccacgagcaccaatacgggcacggaactagcaccgttgaatgcgaatgttgtggagtgttgagttctgaattggtttgtgcaaattgcgactcaacagagctagacatggtagaaatggtagaagcagttaaatttgcttatcaacaatacatatccgtagaagatctcattgtccacgtgagggaagatgcacattacggaccaagaagtaacaagtattacgacaatgagcacactgaattgagaccccccagggaccaaaccaggaaaagtaagactctgcatgcaatcgagcctgctttaaaccctaaggaaataagagaagagctagagaggttgacacacggcaccaccgccgcacaaacagtggccagggtcaaaccgcaaaagaaagaacacatggtcacgatgatggctgacggtactcatatacataaatgttccgaatgtggcacccattatattgaaaaaccagccacgtgtgatgtaaattacaagccgttagccacgtcatgcccgaggtgtaacccaatgagtcgttatgagatgacagaccaagacacttatgacaacccaccaattagcaaaaaagagtcagtaatcataccggccccatcatccatgtctgatgaagagagtgtaatatactctacagtgacaggcgtagagtacttcagttacgtcacaaaaggccatttggactatctggccagtttagatgacattaacatcggcttaacaccgaacactaccagagtgttcttccccccagcaggttttacgagaacggatgtcaaaaactttagggtgaagactgtggaaaaaatcaccaacgaggacgcaagatgtggatattacgcattgaacaagctgttcccaactaacttaagcacactgtgcatgattacgaagaaagatgagtggtggacagcaattgatttgtgtctgtacgccagcagggaggacaaaaacctgttagtaattacagacaacgaagtgtacatacaaactgccaatgacacactcttccactacaccgtcatatgggaaaacacagaagagggtggtcactggaacgtgggtgaagcactgcaagtcaactcacttgacacactacccgtcttcaaatccgtagccaccatggaggagttgttaccatattcacagaactggagctgggagttgcctacagataagaggctggagatcgccacaaaattcgcagctatttacgcgcaagatgctgttaaagttggtatcataaataatcgcttacgtaccgttctaaacaaaggaaaaatgtacatgacaaacaacactagggagaaacatgatgtttcacaaggatttgtgcactttgaggtgccgaagaatctggaattgtacgcagacaaagtgaatgagctgagccaagccttgttgcattcggaattgttccgagtgatagatttcacgaaccaagacccgttttccgtggacgaagccagagacgcgaaatttaaattagagttaagggactacatacatgccatggtggacgtgaagaaaggctgggtggatggcaaaaccacacagtcaataaacatgaccagagtgttcttgccaacgcataaattaaaaacctgtgacataataatgattaagacgccgcaaggcacatttgaacgcagtgtgtacagagccacaggccagtacgtagtggtggccaacctatcacacgtgggtagagtcaaagtgatgatacctgatgcaagcatcggatcattaattagaaatctgtacagtctcgctaccctgagagtgatggatcttagaccattgatgagcgcgagcatcgctaattacggcgtgcacggcagtggaaaatccacggaaatggcacagttctctcagacgaacaaagtcgatacagcagcttacaccacaggagcactattatctctcaaagaaaaacacatagttggtaggtgtgaatctatagaaaggtacaaacagcaaccatcaacagcagccatactccaaatagacgaagcaactggcttaacgatgttggatatagctcaaatggtcacggccagtgttaagcaacttatattgtacggagatcacaggcagattggtttagtggacatgcactacgggggtggcgtgaataccatgatagaagccatgtcagtttgcggaaccataaataaaaattacaaaacttacagaaccggcggagaattaggtgaaatactcaaaattatagagccaaagttagagttacccgagcacaacacgaaagtgaccgtcaagtatgccacagacttagacgttaacatgatagacgacatggttgaagaatttaaggtcacaaaagttttcttcttttactcgaaagacgtctccatgtacaacaagtattccagattagattcaaaaactagaatgttatgcaaagtgcatgcaaatcaaggtttggacgcaccgaacgttctagtggttcacacagcttctaacggtatcaaaccaattcatttagataggagatacttgtacagtgcagccaccagagctagtgaacatttgatatggttggcagtcaacacttgtgtggacaagaccccattgataagaatactgcaatcggatccaagacatgaaattagagaaggagggtttttgccagagccgaccgacgacgatgaaatgaacgaggcattgaaattcgcagggatggaagtgtacgaagaaaaatttaacacactgatagaaaaattctgcttgaaactagcatcaggactgtaccaagatctgtcaaacagtctgagattaattgacactagcgcgtggatagatgatgacatgctaggcatccagttggaaactaaaacggcccattatctcatcttggccaccattgaagaagtaatgaaagatcaacccactatcaagtacctggagaagaatggtagtttaccagtcaacccaatagacgaggaaattgtacttattcgacagagcatcaaacataacttgaaagacttcggagatgcttggttaacattaggagaggtctcacaaatgagcggaaacttttcagagaaaatgttgcgctatctaggttacgttgagcaagaagagttagtgaacacaccgaaaggcatgtgcgctacttataagttaataggttctgacgtgcgactgatcataagtgtagaagatatctactcactcgacgacgtgatagaaatcaaagggtttggggatcagtctctgctgtcaagcactgaggttgataagttgaccatatctaaacctgaaaagctgctagcgacacaagacattcacaggacttgggtaaaaatattgagtaccgtgtcaagcatggacgcaaatttggtgcacgagaaagacgtagatttctctaagcccataagtttacgacaatgctatgtgactaacaggacaccaggcgtgagaatgagtagagtattagccacgagaatacacttcaattgcacgatcacattaaccaaaatgactgagaggattagccagctcgccgtgcgaaaatataggaaacagatggaagaattgatttcagtgttgcttaatgacacagaaaagttccaaaccgaatccactccaacgtcaaacatagaagaacaattcaacgtggaacgctacttgagtggtttgtgtaaaaagtactcactaaggctgattagaacagtgagcgacaatcaagagacctggacagtcaacaccatcggcggatggtttggactacacgtgatcactttaaccacatcattgttgagtgagccagacttcaaggtaattagctacgagctaggtcgctattacccaatattgggtcgcatcattcacgtgccagtggagatggtagaacaaagtatcaatgatttgaacgggtttttgaacaggttcaaatttagccacacaaatatgatggttaaaaatcaaaaacctgtgaccacaatggtgcaagcagaggaaggagagacgtactcgcaagcctatatactattgcaaggcagtgtacgagaactggagaggaagttagatgtgagaaaagacgtagctttatttgacaaagtggaaggtgacacaatagtgatgaaaatggccatgcccatggccacaccagaggaaactctcgtaggtctgtcagacttcaggaggcctacatcatattggaacgacgaggctagaaaacttctagatgatctacctcagcagcaagccaagttaagaaaaactgagctgcctaaacaaaccatccagcgaggagacatcacgactcaaactgagagtgtttaccactcaatggtggagatgaacccgggggaaacatatgacacagtggcatataccttgccaaaattcaacgctcaacaacaagagaatgatagcaccccagaaaaaactcaaaccccagaaacatttacttacacacaacctacaatacagccgctaccacacataccattgtctgatttacatgcgataaccccacccgagccagtggatcaaactgagcatgagatactgagggagatctacggatcccgagtcatagagtcaatagaaaacaccgtcgtatttgaaatgtcattcccaaccaccaaccaagagctactagcagagcgaacagcacaaccaagtgcagaggagcaacgcacggagggaccacatggtttccagttaccaacctatgtggaagaagaacgcaccagtgaaaccccgcaaaaagaatttgaacctgcaccaactgagggtaaaactactaaagatttgtggactgaagtagaactcaaatttaagagcgtgctaaacaaattgttgtgcctagaaagatgcaagcggaaaaacgagtttgctgaatcctttgacgaggtaacgcagagcatagccgactataaaaaccattgttgttgttatgcccacaccaaatctatgatgcagaagtatgtctcagcagcaaagagcagagacatagaagacaattatgtcattgtggacggcacagtcgaattcctattacaagtggaaagagttttgtttgaacctaaacaatacaaagcaaccctgcgagaggactacagccagcactcatacatattaaacttgcttaacgacgatgaaatcttgtttaataattggggaagagagatgttccatactatagatgaaagcttcgccccggatgatcacagtggattcacacaaaatcaagaggcaagtgagaacgcacaggacttaactgaaaaggacgcatcgaggaaagtaccttacactttaatatcgttcgaacatgtcgctgaaggcataattcaggagacatactacacaaaaccagagttgaatccagtcgtaagtttagagaatatgaacttaccaaaaatcgaagacgcattcgaggaactggtagatgcctttatcgccatagatgcagccacaaataggaaaaatttgctagaaacacagatgaaggctaggagagcttatgacatgttatcacaacacaccgactatgagacctacagcgagcgtttgagcagagaatattatgaaaaagaaccaactcaggcgaaagaaacattacaacccaaagaaggaggggaagaagatcagcaactacaagaggcacacgaacagcacattgcaaatcgtggagctggcaacaaagagaaattgatcagcgtacaagcactgatagctaaacacgatgccacgctgttgaacgtcagaagctcaagtgtgcgagagctaggtgaagcacaaacagcaggaggcagaaaaagcttcttgaccgagtgggcgaacaacctgttccaaagccttgatgggaatttgcaaaaagaggaaccagaatcaaacgtgcgcgatggcttgagtcagactatggggaagttcgagttaatgccattcatagttaacccaaaatctgcgcaacaaccaacgaattatgaagaattaaacaacgactttgaacaaaccattaagaaaatggcaatgatactaccagagttagacaaaaaattcgaacgatttgtcggacttcgcagtttagaagaaagccaaatctctgtaagtgaacttgaacgttgggaaatagatgccgctgaaatgctagatgaatatatggcgccaagccaacagaatggtttcaacgaacgacttgacttggaatttgaagcaagagcaaatagaccacgaatcatggagtggatgcttgaggtgatcgacgctagcacagagacaagcagaatgagagagcaagaagctaccaaccaagaggaaattaggcaaatagtgactacgtggttggaaagaacttcgcttaatcagagctacttggctttgaacagggcagctttcgatgcaccagtcgcgccatctaactacctaagcgacacacaagaccaggccccagggcccatcgtcaaataccagtgggaaaaacatccctggcttttagcttatgcgagttggttgtcaaaccaaatttttgagtctattagtccaaccaaggcggagctaaaaagactttgggaggacaagcaagcaaggttgagaagacacagagagaatcaaatggagctgctattcaacacaccactaatgtggtggatgattaaagaacaagacagactgcgagacagggatccgacgaaaaccaatccgacagcaaccatgccacaaccagacaatgattgggccaaatatagctgggttttcttcgcaacagtcaaattcgttgcagaacatgtgatcaactacgtggaagatggacgcagactcgaatacgaaaaatacgggtacgattataagaaagataaatacagactaatcagcggtctgaccactgggactgaaaacgagcgaaagtacagaaagttaaaggaaacttacactatgcgcaaattaacttacaacatgacagagaacaatttgctagaccacataattaagaattccggaaaagaacacgtgactgaatactgtaattaccccatgtttgggacgtgggcagggcatggaattaaacagctcagaatcgaagacgggatgttacactgcttgtacgaagtggatcggaagacggtgagaatgatgcgcaacgtggcactcatgactatgccgtttgtgcaaggtgagttgcacttgataccttccgtcacattcgaggggaggaagttatacatgtccagatcaactggttgtaacttgtgtacagatttagtggtgattaacgatgatggagaatttgttttgagagtgggtacccagtaccacatgttcgcttatagaacattgcgcattaacttagaagcagaaggggtgtatgaagctctggcactgcttaacatcaaattgagtttaccacacatattgaacactaacccactagcagatgtcgatagacgaccaaacttactgtacaacagcgcaggttacgacatcttcagcgtgtcaggagaagtgatagtttggttggataggctaaacacagtcaaagacacaaaaggagctctgttattaaaaatgttcgggttcaagcaaactacaggagcgacattcgatttttccactagaaagttccaaaacgacaacgaactaacaaagaagaagatacttacgaaattgaaccaaactaaccacacagtgtcagctaaagacctgatgagtctaaacttccaaaacctgacacattacgtgtttacattcaccagcaacagaacagggaaaacttacttcgcatacttcgatgcagatgacgttttcaacatgacacctgccagagaggatggcattatcatgacacatgatgagatgtatttagatgtacaaggaataagctcagatgcgcagagatttatgggtgcctcagagtggactagaaatctagtgcatacgaacatagtcgctctacgagacgtcaactggtgggtagtgaaaaaattgattagcgttattagcacaggttacggcccattcgacaatttaagtataccctttgaacaacatagacaattgggtacatcggtattcaaactaattgacgcttacgcatcaaaattaaacgtgacagcagaacgaggcagagcccggagactttacgtgggtgacggccaattagcattgatcaaagaagtctcaccagacatcctgaagaacatggaaatagaagaacacgccgaaccagcgttcacatcagacaacctagaaaccttggacactttaggcctagagatggttaaaagaatagcaggcgaagagaacttctcgtacgtcggatcctctctggtgtcacaaacattgaacaaccacttaaaatgtagcaaacacgtattaactggaccctataacatagacacacacgcacaccaactgagacttgtcagaccgtacttaaatggcttaagcagcatgtttttaaatcacgaggacgagaaagtgaagactatgggcgagtgggtgtcagcagagctcgacagtaaacatccatactggtccgtaaatcacactaacctcaggcccatctcttttgtgtctagctcatcattggaaaaagatttgtcagacatcatagagatggccccaccaaatgccgtgttgtacgtgatgatgccacaagaaggcaagtttaaaacgcactcaatgatccaacagaaaaacacgttcaagctaaactacagcaacaacaaaccagtaatcacaatcaatgaagcaaacaaatcaaaattagagcaaaatctaataccgcactgccaatccagaatagtgtatggagccatgaatcatgtagtgtttgaagtggtgaaaacggatttgaaaatagaaaaaatcttttacaatgcaaacgttcaacacacagctagtaaaaccgtcacatactcacttccaattattgacgtgtcaatgagaaatgtgcacgaactgaaaatcatcaagtacgtcgaaatttcagtgccagaaaatgtggacagattactgtgcattagggcccaacgcccaggcacagaatggaacgaccaaaaacaatatgctagaacactaaggcagacaaccacttataacactaagtctacgcgcgatttgtacaagagcacctctgatgaaatgctactgtgggcggcagccacatacgtgtacacattgggagaaatggatcaagtcaagagggctaaagatttttggacgttgcgagatgaccattctccgggtttagcaactggtttgttgtctaaactcaaagatatgctagggggaatagcttacgaactgagcgagagactaactggaggtaaatcactgctgaaattatgcacagagatgatagagaagttggagggaggcgatgagagtgtgattggtaacgtgttgagaatcattgacgcttaccaagtgaagaggatcaccaaattgcgagacatttatgagaactatgcaagcagggaagaagacaaaccgtactcgaaaccacacgcttcagaacctaagccaaaaccagtcagcaaacctttagggcctgaaatttcgatagacgttaaacacctcacagttttgtctggaaccgacggagatcatgatgggctgaagcagagtgtggcgcatctcaaaccattgacaatataccacgacaaaaccgaaagcgccatctgggtgcaaatgatgaataacttgcacaacaacgacatactgtcaaacgtaccattactgtcgcgtcaatgcgcaaaagtagatttggacaaaaagaaagcaatagccaacgccacggtcatacactgcacaatatttgacttgaacacagcttggatggcctacaacatgggcaaagatgtcaaattgtataatgggttccccactagtgtagtgagcctagaaaatctgttcaaaactctaaacaacgaatggatagacagcattgcagggttcgtagaccgacaagcaaacttaggggcagagtacataagcctagcgtccatcagcgtacacaaatcggtgaacttcctgatgtggcacagagctgcggtgttggatgcgcaaatatgggtacaagaaccactaaggagcctatacatcatgcaaaacaagatgaaagcccacaaatacacagatttttacaataagcggctaccaggaccgacaattaaaacagttggagtatttgttagggtagggccaggccactgggccctgtctatcgaacaagagctgtatctcaagactcttagcgggtcagtagtcatgtccacgaaaaataacgacgtaaggatagatttggaaaacagccactatcagttgtgggtacatcatggggggcccatgagcataacagactgcttcatttacaagcaaccattcctttgcctgccacacgcagtagatcagctgactaacactaacttgttgccaaaaatttttgacttcagatggtgcatgctaaacaagaagagcctccgagaaataattgaggaacaaatggtggaaatcaataatttccacaaatatagaccagctccaaaggtaatttcagtgagtgaaaacgaccaagacaaactgcgtaggacagcaaacaagataatagctaacttgcctcacaatacaagtagtgtgggtttcctcaccacatatagctgttgtgaattggcaaaagataagaaagtggattgcttaataaccctcacagatgtcgattaccccggggccattaggctaccagaagaagacttcatccccctgttcctcgcattcctgttagagatgcaaaccaaacctagcgtgttagatcacatacacacaatttatttgggagtgggagccggagcgatggaaaaattgacgcaagtcaaaacacacgtggatgagttagcagccatttacttgttatcagatgagaaaacattcacaggcttagttatcaccacttggacaaagatgacttacgacgatgtgttcgatcagggagacccatttgattggctatcacggcaacatgtactaaaaatagagactgagggttcaattgagattgctgtacccactaagagcataaaaacgaaaaaatacactgaggttgtgaacaaagtgaagcagcttgcagaagtagagttctttaccaccttgacagacaaatggcgacctgttggttggaagaaaaactacaaatacgcattcagcacagagacaggttggcgcatagaaatgaaggaaaacgccatgactcgggaaggagagaacgtgaaatacacgtgcccagagtgtgagagtctcgtgactctgcacaacagccaagtacaaaataacactgtgcaagcagggcattgcaaaacgtgctacccaactggcttaacagaagagcaattgaaagataaaaagaaccagcccaagagttcaaaccaaaccactgggaaaaccaaagaaaacaaaaaattggagaatgaaaaagaaactgaaattcaagacgagggcaaaccaagtggtgaaaaacacacaagaccgcgcgcaaccaagacgaccaaaaataaggaagacaccgaaatttcaacgaaacagagcaacgacaagattccatcaactgctgacataccaggagcttggcccagagaggaacctgacctaaccacaaccccacgagagaaagtagacatggaagatagcgactcaagtcaaacagatagtcaagccacaatcaagttcgctgggcacgagaattcctcaaagagtgaagagtcccaaaccgacccacgagagtacgagttgggacacgttcgtcaccaagaacggcagggagcatctagtcaaaaactctctccacaggacatcgagggttgcgtgaatcccttcaaagagttgaggtttgagaggttagaagagtggacagtgcggcagtacaggtacaaattagtgagggaagtctacagcccacagtccgtggtaggctgcggctctgactgtcttttacaattaggaataactaccgaaaccacaataggcaccacgttagaacaagttgtagggatttgccttgacgatcgacgaggatatgcagtgctagatgagaacctggaggtatttgctgactgcgatctgaatgaaggagatatgctagtcgtgatgcaactcaaaactacatcctggcaagctcactgggtgattagcatcgtttcagttggggtggaagaaaaaccagaactcagcatgcaggcacgcagccaagcaatcataccagctcacatggtatgtgcggaaaagaaaacaatatgttatgaagtgaagggttacactaaaaacggctgcgtcgaccacacgcatgatgatctcacgaaagagtacaattactacttagacttaagcgaacatcaaccaagaacacttaagaggtcgaaaggagaagctcaaagtctagtaaggaaaaaagaaactttgaaacataggtttgaaaccatgttctcaccagtgagaagggtgatagcactgaaagtcaattcaggattcgtggttagaggatcttttggatcacacaggttggtgatctggcactgtcaaggagaaaaaggtctagccgtgacttgtgcaagcgcgggtcaagaaagtggtttgtatagcccactcgctcctgtagtgagcggcccaatggtagtcgtagacgtgagatgtgatttgctgatgttgaaagttggtagaccgaagagggaagtaataaccctagattttacaagcaaaaacatggtcacggctctaaacaaacaaacgatcaaagccgccaaactgcccacggacacaaaaatttacaacggtgttggaaaacaactgtacgtttaccactacgacaattacaaacatcatgaaaaagaaggacgacgtgatgaaactaacgttttaactcaagcattagatcttgacctggaaatcatcatgcccaacagcttcgacatgttgactttagagttaataatgttctcagcagagaaggatttttatgtcaaattagagcacgggagatacatgctagtgcatgacgtgccaaaaatgttgaaacactacctccccttaactaacacaaactcaccgatggaaataaacacaaaagaagaattccagttagtaagagatctattgctccacatttcagatttcagcggtgtttataaagacttcacaattaaatctggctctacactgtcaccgagtgaagtacatgaacactttgatgtggacgaagatttcagtagggacgtagtgtgccagtatgaagacatagaattgattcattacgggatggacacaccaaccggtgccagacacgagttgaacccttattgtgtaaaattcgaacctgtgccgcacaaaatacatgacaattacatacatctcagtcaatctaacgctctagaaatcacgaacgatgccataatagcgagtgccataacggctccgatagtcaatttggttaaccaaattgaaaacatcactggcgccgacaccgatgaagccgagtcattcatcaggtggaagttcgggccactagcaagcacgcttttagaggatctgaatgagtatttcaaagaatacgagatcaacatcgccagcagctttgattatgcctcgacgataggcaacatgaaaacgactttagattgggaagttttctttgaagagcaagggctagcattcaaaaacaatgcatatgggacagtcagtgatgaactaacgtacgtgggaagctacgccacaccagagaatttttcagactaccaagaggtagggaacctttggataccgagactgttgataatgttaaagcctcttaaagttggtggttacaaaccagaagaagatcgcaacctctggttcgtggagaacgggcagaccgataattccatgcaaatgaggccctcaaaaaggcctaaacctttggctataggcatcatctcctctggaggtggcaagtcaacactcgcgagattggatactagaatagccgacggcgaccaacatgtattgttaccagctataccagaccctgctgcattgagtcaagaggattggtacttacgaaacgaagacataaaaaaacaattgtactctcaaggtacgaacttagaagggaaaatgttgctaatatggcaccctgacaacatccctgaactctggaggaaaactgttccgttatacatctacatcattgatgatatatcaggggaaagactcttcagtttgaataaccaagccatcaaagactgggtgtctaacaaccgtgactatacgcccaaaccaacgattaaaacggtgacgagaccacagctctaccctcacatactgaaggaagtattccgggctgaaaagtataacaaaaaagaaataatagccattgatgcgttgaacgcgctgcagctggtggacaatcccaccgtcaagctaacgttaacagaaagaccattagtgaaatggatgttaccgtacgtggctgcacaaggcactaacgcgaacatgttagacggtttcacgccgaccccagagaatgttaacattcagacaattgatttcttttcaacaaaagatcatagagactggatgcagatcaatttgccaaaaagtgaaatgttaattaaatcaaaagaagtatacggcgggttagacgtggaaaggaaaacaactctgaccaagtaccctgtagcttccagaccggtttttactaagacaatatttagcactttaaattccgtgacttctcgatatggacaagtgaccacgtataggaaacaggacctaaacatcagccacgaagtgaaccaaataatcaaagcgtacttcgtggagaacgcggaagagaccatcaactcttttaagtccagaccaatagggataaatcacaagaaaacattggaatggttggacgctcggccagatagaaacaaagtcgtggatgatttgagagaaatattacaacaaggagtggaagtaaacccagtgacagctatcaagatacatgcaaagatggagtctctattgaaggaggaagttatagatgctccagaagatcagaaagttcgactaatagcctggcagaggtacggtttagccgccatatacagccccgtcttcaaagaggctaagaacaggttgaaagccttgctacgaaaagacgtgatttacgcagatggttacacagctaatgaactgtcagccagggcaaggacggtagtcggcacaacgcgtttctttgaatctgacttagctaaacaagatagacaaacagaccaccaagacttgaacgtggaattcggagtgtatgaaattttgggagtgtccaaagatgttctctcatcatggagagctgtacataacaattggagatggaaatctaacctgcactctggatacggtgacgctatgcgcttaacaggtcaagccaccacagcgttaggaaatgtgatcgttaacatggcggtgcacagtgacttagtgctgaagaacagaaaagagatacagttggtgctcatgctaggtgatgacaacatgttcatgtgctccacatggttggacctggaagggttcaagagagacacggctgaaaaatggaatatggaagtcgtgccagcctcaaacgaaactcacgggacatttattcaattagtagcttacaaaacagctgaaggaactgtagagctcggacctgactggatcagactagctagaagatttgaggtgaccaacggtgtgtcagaagggagcgaggaaaatttactcgctagatcgatgagttatgccatgatgctgggagatttacctgaggtgcgaaaattgtgcacggaacagaactggcccattgaaccgttctcatggtatgatcccatgcggctgatgcatgcactgtgcgcaaaacattctatgaacgaagctgcagtgttatccaggttgagtcacttgatagacatgatgacgcgccgagaagccactacgcacgagtgggaagtcccagtggcaatcactggaagaaaacaaaagtttatgatataa

SEQ ID NO: 1240 - DNA, 14681 bp, Rhizoctonia solani endornavirus - RS002
  source 1..14681: mol_type = other DNA
atgaatgacctgcacttagggggcaaaaataactgctggcaccaagcattttcagtcataccaatgtggaggatggtaatcaatgaactctggctcaaccaaccagcgcatatgggagacttattcgacatgatgcaaacactagggaaaatcactctcaatggaacaactttgcccctgtcaagagaagatgtgcgagaattcttgtggtttaagctgtcccattacaaagggaaagtcatgcatttagagcacatgatacctgcgattgaaagaccagacgaatcttacaagtcgatgcaagagttaatgaacgcagcctcctggtgcacacaaaaagctgcagaagatgatgaatttgaccccgagctggatgagcatgtcatggaattattccaggatgacgtgttgtacaacaccaggcctaatgtccggctcacgaaaaggattgttgaaagagaattcatcaccatggactacagcaccggacagtacggaaaatgcgtaaaggcgtgtgtcgacatgtacccggggtacgtaccaaaacctatacatagagccctcgattggatgaaaccagagtcaatctgctactgtccagtcggacacaagatgggaggtcagtgcttaggattgtgcaaatcagatgacaccaggatgggagcaaaagaaatcctagagtttgtcagacgagagggactgtcggggggcagtgggctgatggttggtagtgaacagtggaatgaactcgtggcacaagatttgaggaagatcaaaaccattctgggtagaactgactcgagaattatttcggcaaatgccggactgacggtgccgcaaaaactcgcaatcgaggaagggtttccggacgtgcatttagttgtcaggagacaattcccaaacccgcatgccttccttgccacatgtcgcaaagtggcaagggacttcatactgagactgcacaaaaatcggcctatggtggacattggcggctcacccgacaagtaccgaccacaggacttcaccgtcaggcctctcttggatgtgtctgacaaagtaagacaactggtcaagccaacaataaacggatgcgcacacagagtcggcggatgcacatgcatgtggccagaaaaccatggtacaatgttaatagattccatatatgacataacagcagacgaattgcttaacactttggccacacggaaggtggaaacgttttactacacgtccagtttatacggagtgaatttcgataaggcgaccattcaagagttagacctagaccagggttacgtgcaaatccttggggatataactaccacggtattaactggggaatcagtcagttacgagaatcacactccaactgccagaatgtggacagaggatgacatagtcagttcgagttcaggagtctcatacaggatacacacattaataactgttgggaacttttgtctacgtggagcacaaagattgaggaggagaactgacatatactcgcaattggtggttagttccccctcagtagagaagcagatcataagactgccaataataaagcaaaacatgatcgtgcccggaatcgaattgtactaccaattcgacgtggactcaaaccctgtgctgaattggtcattcatagagtttgggttggaccagaatttgttcaatcaaatgtgtgatcggaacttcctcggaaacacggggtttaatacactcgttgaatatggactagcgatcgcggcatcaaaatatcaaatgcatgaccgtacaattggaaatgagcacattacggcaaaatctatattgtgtcatgcagttctggcctcggcgttcatgagaaggaaaaatgcaagaacatctgaaatggcagaagggttggcgaataacggatctttccagcaggttgtaatgtcgatgctcatgtttgcgacgcatgcagcgcaagacatattcaccacactcatagaccaacattctattgccagagagtacctaaataaattggaccgactcatgagcaacactgcaatccagcagcaagtggacaacaagtggctaccagtatgggaccaactggagtctaaatttggaaccaaagtagttaacatcaaaatggcggggaccaacaaatcatttaaatcgtgccaacaccattatccaggatgcactcacattggtggagagacatgtgaacattgcggtgagccgtcagttggtaacctttgcacatgttgttcaattggagaacatattcacacgtgtcaccatccatgcacatttggacaccctgaggacggcaccgcgatctgcacatgctgttcattcttgatggatgagaagtgccataactgtcaacccacggacatatcatacactacatacaatgaagttatagaaatagtaactgaaaaagcccaactaaagaccaaaggccaagtgatcaaagaaggggaacacacacacacatgttggtgtggtaaaatcattcaacacgacaagcaatgtaacggaatggaacactacgaacataacgagcacaatgatgggcacatgttttccttgggaccacaagtgaaccgaaaacaccagcacgtatgcgcgcgagggcacatatacactcacgagcattataatgaccagcccgatcacgaccacattctcgaaaacgacccagattgtaagatatgcaatgccggaataaagcagaaagaaccaaaacaaagtaaggactcggtcggcaacgaggaaaagcccgggacaaaagagccagaaacccaaggatcaaaaagtgaaaacaagacgaacgatcaaacacctaatggacaaaacgacgaacctcaaagcagtgagactcaagagcaagagtcagacatgtcaattaaaatgaccgcggaactgctcgctggaacttctgtggaatacatggaattgatggaaaaaggatggtcttttttcaatttcaacacctctgaaccaaataacatgaaggggagagtggcttttatgccagccggagtccatgtgatggactcagacaatgtggccataagaagaagggtgcacatagaaaacgatgatttgcaatgctgcagactggcttttaacatggtaaccggactcaaaactacaccccaagattggaacagagtcacaaataaattggaattatggaatgccatagacataatagagatggcaaaactgcacgacatatccatgatggtggcagcgaaggacaacgtggtcatatacaaagtcaaacacgatgatggagaaccctgctccatactcataaccgaaaatgaggatggtatgttacacgcagaaccctgtagtttaatgcaattaggaccacatgatgcatggccatggatgaactccgagttcgatgaaaaggaaatgtcaaaaatatgcggtgtagaaaatatgcccctattttctgaaaccaacaccctcaagagaatagaattgtcttggaaattgttacaagaaagactcaaaatgcaaagcatggttcgggacatcaaagaagacctcgttatggtcaagggacaactcactaataaccaaggcgcagtacacaaaccagatgacggattgttcgcaaccaaactcaagtctgaagacgagtggatcataccgttcatgacgaaccccacccaaggagatttgtacaaagaagagattgcacgtgtggattcactggataccgacgcgcttgacgttccctcacaaagaaccgttaacattaagctgcttgtcagggattacgtgaacgaatcatccacgcccggacacgggaagtgggtaaacctcaagataatgatgaaagatggattctgcatattaccgaacatccaaaccaaggcgatcaagactggtgatagaatttatctaaaattcgggtcttactcagtgacaagattcgtgatcaaagtgacgcaaaaatctctatacttgagggggatacctacgagaaacaattccacagtcaaggtatactacccagacgtgagcgttggaagcctactcaggaaattgtttagaattttgcaacacagttacagttccatggctttacatgatttgttacaaaatagcgagacacacgacggagtagcagggtgcggaaaaagcaccaaaataaaacaaatgatcaaagaaggcgaaatagccactgcaatgaccagcggcgcgctggatagtttgtccatcaaattggggaagagcaaggtaataagcgtagagaaattactatcaattcaacacaactacgatgtgatatacattgatgaagcaacttccatgacgccattcgatgttaccctgattgctcagaaagcaaagaaaatacacatgtttggagacacggatcaaataggtctgtcagacatgcattcagcacctggagatcgatccaaagtcatggcgatggcatatgcaggtagaaaggacgtaaacccatattcactgagagtcgggaaccctctagccgcagaaattggaaaggtcattgagagattcaagaccaaagcagaccacgaaacaaatttcaacacactatgggaagagtcattcatagcaagcaaagttgttgatctagctaaagaaaattccatcgacgtgattttcgttttttacaaaaaacactacgaggacataaccaatcaacttaatttgagatcaagaactgagcgaactaagatcaaagtctacaaagtgcatgccaaccaaggaagagaaggagacaacgtgatggtggttcagggtggtgtcagtgacgatttcagaggaatacatctcgacaaacattacacctactcggcagccacgagagcgaaaaagaacttactgtggttatcaattggatgttatgaacaatccactccactcaacatcagaatatcaggcgtgaactcagcgctcaggggtgccggcggaggaggtgcatcctggttcaagttggtggaagataaaatggcccatgaattgaccgcggacatcgtctcagatgacgaggtacctttgattatactcaccaccatcaagatcctggtacaaaacttagaacattcgatcccgaggcatctaacctacaacctcagaactgtagacacaggccactggtcatgtaaaataacagacaacttgttagaggaaacagcgactttgacgttcaacccaacaggcatggtcaagtacgaaggagaacaatcaatcatagacgaagcaaaagaatgtcttacttttatggcagataacactggattcggtggtgcatgggtggaatactggtccaaatttggatgcgtttatgatgccggactactgaatcacaccatcatggccacggcggcctgggagagactacaagagctagacgtagaatgtaatgtcatcagtgatgaacacgagtcacgactgatcgtgatggcagacaaccctatcatggttaaatataatgatcggggaataaacagtattgttgctgaagacccagaactgccggcctacatgcacttgatcaaagatgcaacccaactggcagtagatttggctgcaaggcataaatcagagtgggtgagcagttacaaacgtgccattaaacaaaaagaaacagagacactgaaagtctacaaacatgaggtgacgcctaacaccgaaacagcgagtcagaacacaatagattatgataacctgacgaagaaggccatattcgaagtgtcagaaatcatgctgagcaacacacctgcaatgatgcgaggcaacatcaaaatagaagaacaaatcgaggaactcaaatcagatggtgcgacaaacccaccgcacatcgatggatacatggtcaaagtcaaggtgctcagcaacatgtttatgatgtcgggattactattctacgtggcggtaaaaatgatcaaagtggaaaggttcggactaccagcaatagacgtgaatgtagtgaaatactcaacaacaagcttagtggagaagttccttccaaaaggagccacacgagataattttaacgctaaagtacaaggaattgttgacaacttaatgaaggaggcaaacagacacacaaacccactcattgatgaaatgacagaacctggattgaacccagaagatcttgaacagcaagtagatgtgttatttgatgaccaaggagactatcacgtgccagggtcttggaaccaagacgatgttgtagagcccatatttgcaaccggatggaaaatgccaaccactgacgagccgaaagaaatggagtatgaacctgaaccgttggactatgagtctataaacaggaagattgcaaatggggaaaatatcatgacattgatatccaataccacgaaatcgatcgttgaaaacaccaagaaaattatagatatgccaaacgtcggaattagaaacaaagtgggagcgatattatccttgtctctaacagaaaacattctcacatccaccaaaaatgcggacgttaagtttaaatccccgttcttcaaaggtttgtggcaaattgcaaactgggtggaccccgaattaacagtagagagcatggaaaaagaagcgaagaagaacgaatatgtctggacaccggagttcagtgttgaagcactcgacagcctcaggaaatcggagctcttaaaggagcagatcaatgcgcaacccaagattagaggggacttagcagaatttgggtgttgtgatggctgcacgcacgaaattgacgaatggaacgcaaaatacggaattcatcctgtcaccgggaacgaaactctgattgttaaggacgtgtggatacccaggaaaaccgtgaccatcatgagatgcctcaatgtgctaaatcaagtgagattagacagctcagacatcattgtggatggagtagaattcacattgatgggtgaaaaaggttgctctgcgtgcggagggatggtggtgtattacaaaaaccaagtctttttgaacatacaaagacaatacactaacttagtacgcaggaagatatacttttcgccgaacgctatcaagcatcaacgcgaattgcaactgttactcatgtatttaggatttggagttagaaacaaacatatcactagtggcatcccaggatatctgccattggaattcaaaaatctagacatggaattcaactacgtgaaccagtatggagtcgatttgaacgacagggaactagaaactgtgctactgaccgagagagtaattgctttctttaagggatgcatgggcaagtaccaaacaggggagaaactaccgaatataatgcacacttggcgcgacaacaatgcagagagaatactcgatatcaatgaatcactacaactccacaatttagaaggtaacgtattatcaagcccgttcacatcacaggaattttacatacatcacatcgatggacactcatttgtaatactaaaaccgggagccaaagacgagtgttacatgttctcagagaggatacccgaatggattggaaacactgcacattttgtgctaccatatcattctttccaaagagtcatagctacttgcgaaatcgacagattaagagaaagcacaccaacaatggcaaagaaaatcgttagtctgtgggcaaagagacgtgggaaaacaattctcgataacctcgccatacctttccagcaacataaagaacacaacaccatcgtttatgcgcatttccgacgcaaagcagaaaaaatctcggtgatggaagcgaagggcaaggcgcaggagatgtttgtaccagtaggtggtgtgaagtttttagaaatggcagacccagggttagtggacgacatcgtggtgatcgaaggtggagccttagcaaccgatcgaggtggagacgttataataactagtttagggttgaaatggactgctcaaaattatggtaaatcagtacacatcgtcacagcccacccgaccattttgacgatgaatagcatgtggcaaagcgtaaccagcccaccatttgatattataaggaatgaccattatatgatgcaagtagaatttgcaaaggccatgcacatggagatagtcggtggaattcagaacgaaaccgaaaaatctcaacttgaaacactaatcaacaacgacggtatgtacctcaaaacaccaagtccaatcgttgacaaacccgttttgtacgtcggattggaactctgtgccatgtcattagacaaaatcatcagtttatcccacgctgggggaaaagtgatcgttggtttggtaccagacctggatataaacccagatgtagcaaagtggatcataaccgacaacatatggatggtgacgtacaggcactcaaatttgacatacactttaaatccacaatccgtacaccgtttcatcaacttaccatcatccagacatggggagtacaacttatattccaaaatcaaatacagtttgtgcggacactggattgtggagctgaccgtcagcaaagaccatatcccctttggggagcactacatggcagtgcactcgggaatgaattcgtcatacatcgagtatgaaatcccaaaaatcaacgcgtctttgttagacattgccaacgacaaacttttggacactgagaaggtgagaattcctacaaaaatagccaacaggttggcgagaagatgtctgagagaaggaacgacatatgaggacctcctgaactattgcaggacgattagacacaagatgatgtactcggcattcgggttttggagcaacaatcaacaaaccagcacacaagcaaacggttggtgtgcagccatatatatagaaacattaagtctcaaaaattcaatgtcgtcaaccagggacactttcttctcaaccggaacgggcgggaatagcattataaacaacatatcagacaggttaaatgatttcttgaaagggggactagccgtgatgttgcactctaccggcttggatcgaaacttcacggaattcatagaagaggccgcatctcatctcaaattattgtttaaagacgaaaacaagatcgaatggttaagaagaaccattgagaaaacgcattcacacaaactgcaatcacaacccagaatgctgccagtcaatgaccacaatttagcgacaattaaaatgaatttaacacttgccagaattgggaaagtcagcacttggggcaaactaatcaaatcagtagtgaaacacaaagacgaagttggtgctgaggatcgagccacatacttaaggaatctattcgtacataacctgcgatccgtcagacccattgaattcgctcagacacacgccaaaaccatccattacccaagcatgaacccaagaatattgatacttaaatcaggaacttacggagaccgaacattaatagacaaaatgacgaaaaaattgaggacaatgcccggcgtctcctacttgagcggttggaagtccgagcaagtagacttcggtgcattgggaaaacacatctactctggcaacttcaaaaacattattgaagaagtcaaagcatggcgggacaccccgacaggagagacggctaggcctaacctagtgatcagtgggatctgggacgtggcagcatttgaattcgctaaatatcattcagcaacgtggctgcctatatgtggattcccaatcgaatcacgccacttcccgatgttgggggtcaacgtgaacccaaaagccgcactaaccggattgtttgcattatactctggattagagataacctcaaaattgtccgtactccaagagttccaagcgtgcatagataatgcaattgtctgtgcaccgcaaaccctatacccccacgtgcccaagaagtggtggcacgaagattattccgctggggaagtaatcactgaagattgcattctgtgccatgtccctctaacggaccaagaaaaggaacgattacacgcatacaacctacccataataactaccaggccagtggatgtcaaagccagcaaacaacatatcaaaatatgggtgcttgctgcaggttacaacagcatggcgatggcaggaaaagaatccataacaatgctgttaaaaccattgtatgctgaccaattccatgtggcagaaatgtttaaggagatcaaactggatgagaacgagggcatagacattgaagaaatcaaacagaaaaaccgtgcattaaacgatcgctacaaactctgggaagaaagcgaggaaaccgatggcatcttcgatgaagttatcaagttagtggcatctgatggcatggtcaggttcgcagaccaattactaccgtgggaagaaacgcaaacaaatgacatcttcaataagttcagggtacagggtccaatagaaagtatttgtaggcgtttaaaacaatacttgatgaccagatcactgatcagcaagctacatctagggcccctaaaaactccaagacccgactgcctagaaatactattcaataatgaggtgggtgcaaacaggacgactgaacagttgaggatacaggacgtaccaaacaacaagttggcaatccttaaattagccatcgctttacaacccaccggactgacacattatttgggcagagacgtagacaatgtggcatcccaatcaacaaagatatggttgcagggagctagcatactcgaatcacaagtgcgatctaggcaaggtggactaacgacaacttatgtcgcaaaatctaaagcccactattctctgaccaaggaactagacaattatgacaagccggaatattccatttgcaagtacatcacaaacaagggacacaaatgcttcgaactagatcttttgaactggatgaacaaaaagcacccacacatgtcggtcaaaataccagtgtcagaacacataacagtcgccctgggtgaaatgcctaagtattgggatgaactaaacacacaaccgttcacaactggagcagatgcgccaaatgacgaagatgatggcggaccacaaggtcccgacgaaggttggggtggtgagaaacctaaatggggaggctacgaacccccaggcgacagtggtggaaagaacgatggaagcgaagaaagcgaatcacaccacgacgaagacgacgatgatgatgatggcggctggcacgtcgaaccagaggaccatggtgaaggtctaacaagaagacaagaattggactatcaagaacacctggcacagacggcaaatgagccagaacacgtggacgatccaaactcttctgatgaggatgagctagaaccacagcatatgctagacctgaccggagagggaccggggcacacgagaaccgtcacagaaatgaaccacaacacacgtaggtctgttttagcacttggaaatttacccatgttggctgggccgtttgaaggtcacaaaatagcaaatgacgtcgaaactgaagtggagtacgatccggagacagagacaggatgtgtccgacaatgcctagaaaaagggactggaaaaacactcactcagttaccaggcagcatggatgcggcccagatcatagaggcgtgttacgtgctcaagttgaacgtaaatttggtcaccaaaggaaaaggaatgttatacaagttttactctgaaccaagatgggtcaccctggacgtatcaacaaatcactgcaaacttctgaacgaaataaacataatcatgcgcaaacaaatcgtatactctgttagcaacatatcgccatatgaaaccgtgactatcaacaacaggaagacttacagatgggcaccatggcacttcgaagaggtcataggcacaccaggctggacggagcaacgaccggacatagaaatagaaagaatgattttgaacgtggatgacgatgtcgaggactgtccggaaagccaattattcaacaatggatattcagtcttcaagaacagctttcgtgtcagaaatttggacttgatccaaacacgcattaccaaaccagtgagaaagaccaccatcacagcaacggagtggggagcatggtcacctgacacgtgcaaatctgtgagattagtgggtctgctgtccacggatggagaatggaaactctgcgtcgaatacccatgtgggggaaccggctactattatggaaaaccagtcaactgtccgactggaatcataatggatttgggaaccaatttgcattcagatcctttgtctcgcaccaacatcagtttgggaccaaaatactacaacgctgaaaccaaaagagttatggccaatgtgataccaggcaacgctacagttggagtgagtacaaatgatgtgacatacattagcagcaattcatttagaaaacatcacaggtacgatcacactaagctgatcgaagcagactacaagagattgatatttaagggtgctaacatgacagaacgcgcatggaaatggatgatagaaccaaaattcggttggtcagagttcgatgaagctaggttcttctacaaaatcgaaatctcaaatagagacccgcaaaaaatcaaagaatacatggagcacatgggatgggtagagagcagaagaaatggagacaccagagtgcacacagtgtacatcaccgtatttaggagggaattgcacatttcatcagaatctcatgacgaagtggaagaactctcagattggatgcaagaacaaatctcacactgcgacgtagacgtgtcagaccatgtgaggatgccaaagagaaaagcaatcgcagacgaatctgaactgctggaatttgggtttcacagaccaaaagggatgtacttcatgagtgacatcaacggctacactgacaaaaatgcagaagttaaaggcctgctgacctgtgaagacagtatagacgtagagaaacctgcgggcagaggtaaaacaagcctgcaaacggaaaaactgattcaaccagatacgccgaccaaccacacgattaagccaagtgacaataaatccagcaacaacacagggaccgggacgatcaagggaaaggaaaacgcagccacgatcgagaaactcaactggttcaatgaacacgagctgggtgtgagagcagcgtactcgttgaacgtcaaatctagcccgatggggatagtttgcatcagttcgggaggcgggaaaacatggttgtacttcaactattcaaaattgatagccgatgctgataaatatgtccgactgccagtaataccagacgcaaacaatgtgccaatagggttctggacagagcgcaatcagttagttagagagcaaatatacagagcaggaactgaaatgaccaggaaaattttggtgatatggcacccagataatgttcccaggcaatgggccaacgtaccgctgctggtaataacatgtaccgacagcaaaggggaaaggttgtacgaaatgggacaagaatcattgagacaatacattaaatcacaccccaaggtggcccacaaacacataccgcgagaacaaaacattgttgccatcagagaacactttaagataccactgccagattggaggggagacataatgtcggaactccaattcaaggacatagatatccttgactatcagacatccaacattgggcccaccaacaaaacatacatgccgtaccttgaacctagcacatcaaaaagccacttggtagaagacatggttggtgaaccggaccagtatgatgtcaacacaataaacctattcgaactgtccgacaacactgactggatacagcgaattgcaccaacaagcagtatgataatcggtgacaaagctacattcacacacgtcaaggaatccgaaaaatctacactgacacaatatccagtatggagcagacctgtgctgacgaaaattgccaatgccgaattcaacgcagtcactagcaggttaggtgcggtggagataagaagaaaggaagggttggacgccaaaacggaggtgaagtctattgcatctgcttttttcaaacaagattgggtcgatcagtctgaaaaatacaaatcaaagctgataaacatagacatggaagccaccaacgaatggctcatgggtaggccgggtgaactgggagtaaggaacgacctaaatgacatgttcgaagaaggattccatgtacactctttaagaagtgttaatgtgcatgccaaattagagtcactgatgaaagaagacacaagaataaacctattagaagaacaaaaagccagaatcatagtctggcaagaaaaagcgatagcagcaatattttcaccagtgtttttggaggcaaaacgcagattgaaagagatattaaataacaaaacgatttacgctgacggtctgacaccgcatgaaataagtgctagaataagattagccaagggtgcaaacaggattttcgagtctgatctttcaaaacaagatcgccaaacagatgggcctatactcgatgtggaattcgcaatctatgagctgcttggcgtgcatcccgatgtactaaggacatggagaactgtacacgaccactggcgatttaaaggtcggaaattctcagggtttggacacgaaatgagactcacaggccaggcaactacggcacttggaaacgtaatcgtgaatttgatggtgcatgccaacattgttaacaaacagaaagagcacattaaattagttatggtgttggagga

SEQ ID NO: 1241 - DNA, 16617 bp, Rhizoctonia solani endornavirus 1
  source 1..16617: mol_type = other DNA
atgaatcaggaaatatcaccaattcattcaacatctcatccgttgaatacacacacacacacacacaaaacaccctttacactagattacaaagaatctagtgtaaagggtgttaaaatggacatcgattacttaatcaaaaggcaagaatacttatggagtaagtataacgccaacgtaatattagataagatgtccaacttgaagctaaaacacaagtacaacaaaactaaggggttaccaaggtgtgtgtataaagctaacataaataagggcaggaggctgttgagaagcacgttgaagaagctgcctaaaaatcagagaaaacaacttaacaagcgcggacaaattaaacaaggttctgcgacccccgcacaggtaacattgccgagatctcgaaagaatgctttctgccttaataaactaactggtgttagaacccgttcaccatactcatccggtttgcaatcaggttattaccatgtgagaattggaagtcgaaggaatgatccaatcaaccatgttgacactgaaccattcacaggttccatccttgcaaactacgacaggacaacaaactcatggatggttgacggggtggatgacatcttctacagatataaattctactcaggacgtgtggacatgaacacaggaatccataaaatgcataaatacgtggacgagaacggaatagaatacgaggagagtgaacaatatactgagaaactcatcaaagacaacctcaaaacttcctatacagatgacgcaccattcacccaaggtgaattgtctgagttctctcacataaatgaaaatcaggtgtataacacgtccattccaggactagttatgttcacacataggaaaatagtgagattagaaacaaccatgcaattcaagaggccagtagaggaccctttaacattcttggatgaaaacggaacttacaccatccctatggcttacatggtaccttcagtacatcaagagaacgatgtgacaggatatgatgatataacgcatgatttcggctggatgtaccaaggggtcttcgactacgacaagcaagatgtcaactcacctatggcttatgcttcagttttggctagcttcaagcatgcatcattcaatttagaatattcagaaaacaagctcaaactggtagaagaacgaacgcccaaaactttgcaatccttgttgatgtatctgaaagaaaggggtaacaaaacttttatggaatatgtttccgatagcaagagatggttacacttggttttggctgaagatgcacatggcaatccttgcacaaacacgaaatttaaagattataaaaagatagaagatgattttgctttgggatatgacatgcttgctcacccttactacaggaacgctcaaggaccaaccaaacaatttattccaagcttcttgactacagctacattgtttgaaatgatatacgatgaagattattggtactcttgctgtaattgtaacgaaaatgtctttgttccacaaatggtatcaaaaatgaggggcatgtttaaaggcagctctttgttcataacaatgcatgattactttaattcgctaacatgcccttgctgcaacaacagaatttttactactatgccagattctagtgcgcttgtcacaaacactggcctcccactcaaaggtttaactgacccattacactggatggacgagatgtatcctggttatgtattcggtcagtccggaaatgcttcagcaattgtggatgagcacgacttacgtttattgagaagggtgctcagtatgggtaaacctatgatgatacacttaccatgtgaggctacaaacatacaagaaatacagtcaagatacaagagtgtcagcatcattccacgaccgggacttcttcacaatcatggaggcaacgccacggctgagttatatgccctggtcggcacggcggcacaaaacttagcaagtgaggaattctgcacagtctctgtaccaccaatgactactgtaccgcagaacaacaacttggagagcagaactgcaatcactgtatttgattcagttaaagctaaaagtggaatattggcactgatggacaatggatgctcagtaatctattgtgttacacccagcatgactggaacacttgctagaaggcagataggagcttatgttgcatttacatgcaatgctactgacgcgccatgggtcttgccagttggggattgcaatgcctttgactctactgcgatcattagcacagcaaaatacacgtacattaacaccatggtaaggcaaggtatatattacaatctagtttgcctgattaaatatgcaggtgatatgggcccaatagaagtacagagcttacgaacaaatgagataaaagaattcagcataccattccttaacccacatggaacaggcaatatgttaggatacggatggattaggaaaaacgtcctggtgcataaaaggttactttcagtactggtgaggaggaatttgagggatggtgatctttcttttgactcaatgatggaagctgccattggattagcgatgaacagatataacttggctgatagaacagttaagctaattaatattgacgccgagactctaagtgaccacgttgtgattgcctgcctgatggttagaaggatgatcatgaagcaagacaaaatcttaacactgatgagagccgatgcatcgtggagcaacgtgggtgaacaaatgctcaactcagtcgcagccataactgttgggactatgttgcaaaagttcaatgcattgagaaaatacgcaaacaagctcatgcagttccatgaaagtgccatgttatccgatctggatgcagttataacggacatgaagaactgggtcaaggatgccgccatggatgagataggtaagcacacttttgacttcacgccggaacttaaaataccaacttgctcacacgccctgggaccagagccagagaatggtgcattcatgtgcacctgctgccaaaggaaaagccatactctcacttgctcatactgcactgttatgccaaccagcacaacaataccatggaacgacgacatggttgaagaaaaagccaaatcaataggtccgaattggagggagttcgtgtcatccttacacgacccgaaagacaaaatgtctcatccaagcaagccaaagcagcctgggccatttactaaaccaaaagaaaacactggtgacaaaacattacaaatacctaacaccgacaacgagcacaccttcggagcaaagaatttggcgccaacttatcatgtgcacaaatgttcaagttgctcagctttatacgcacacaggttgcgcaaacccgattcacctgagtactacaaaataggagagaaacaccatcaatacctcggcgattgtccttggcatgagggctgcactacaagcattaaaattctggaaaccacacccggtacgtttgaagctgtgccagaaatgacgaacacaggcacatcagcagatgaccaaatggagttggccaaactcacaagtgtggagtgggccagaacgctagctgaaggggcaggcactttgtggccaggaactctgggcttgagaccaatacttaaaggagaacatgacatacgcaaccattacaaactttctgatgcaattaattatccattcaacgacgcaacgtgtggtcgagatgccctaaaccatctgtatccgcacatcagcaaagatcaaatagcaatagtggttggacgacacgaccgttatacacagagcaacatcatggaagtggctaaagcctgttctttagacatattagtaataagtgatgaagcgagcgtgctggcgagatatggtaatggagcacaaatgaaagcaatgcgtataactagagttggtggtacaacaccgcattgggaagcatacaacttcgagttggttactactccgaatgtaccttgctcttatttggaggatataacagaaaatgtgctacaagtagcacatgcaacattattcaagaagaaatggaccatggctgaacactcagacgagagaatagttactgaattgcgtttactcaagagtagtttgggtggcaaagccattgttccaagacccatatataaagaggggccaactggagggttcttgaccaataacacttcatccctgcatgacctaaccaagggtttagttcatgtacagataccaaatgatgttagccatttactcccatacgtcaactcaactagtagagttgacttggttagtgtgaatctaggagggagtgtcgacattagtgatcagatagagggaatacatgaggagaggttatccagaataaaagatgctattagaagcatagtagatggatttacaacaactcaagccgaggttgagcctaatgatctattgactgtaacaacacccttcaccgtattgagcaaagaaaagatcaggttggagctgccacaaaaacacgtgttcaaagcattggatttaatatatttaagatctgcggggggtttcagtcctatgataattaatcccatttcagctggtggtaggcaatatacagatattgctgcaagtatgccagttagttcagtcatgacgataaaatacaggaaagcgctgagtgttgcatctgcttatagagcactaactgggttgataaaacctccgcctccagtggaaatcatcaagaatgtattggtaagaagcaacggaatactagcccccggtggctatgggaaaactacagaaatcgtacagcgcatgaatgctgacaccttggtagtatgttccactacaatggctcaagatgtaattaaagaaggactaagaaaagccctggtgattaacaatcaagttgtttcagaacctagaccggaattagtcgaaaacgtgatatccttggaaagagcaacatatcaagacataccacacaagagacacataattgttgatgaggcaggaatgatcagaccataccagttgctcacacttatcaatcctgagtcagattataccttttacggcgatgacactcaagttggatacattgatttttccacactgggggggttaaaagcatccaaatccatctttgattatttgccacaagacaatatatcagtaaagaacacacaatacagagtcgcagaacccctgtgtttagagatagataaagtaagaccagcagggtataaatatgctggagaaatggtggagacaactgatgtggatggttcaagcagaatggaaagtaaacggaaaaccaacttcgatttgggctatatgcacgattggtcagatatggcgataggttcaatgatttcctcaggtaggtatgatattgtactggtattccacaacgatgatgtaagagctgttgagcaggcagcgaataaagccagcaccaaagtagcagtaaccactgtgcatcgcagtcaaggtggttcctggagacgtgggctggttatacaacacagatactcaagtaaatctggggtggaagtatcaccaagacattgtatgacagctgcaaccaggttcacagatcatctatcatgggtttctataaattgttatgagaatgcagatttacccactagaatgggcaaattaggcgtagcgtcaatcggtttcggcatgatggacaaaatgaagagttggtggtcaaatattaaggactcagattacatcgctgactgcgctgacgaactacatgcagcagcaatgaaactggacaattggaagccgaaagtggttgctcaggaaaccgggttcagacaatgggcaaaatatgctgccatgaaaagcaaatatgaaagcaagtacccggtatctgtaacggtctccaaagggatagattatgacatagttaccatcaaagcattaggtctaacaggagagatacacatttaccaagataaagtgcaattaattagagacatgatgggcatgattaaacaagctgatatagacaacgagatgagagcagacccagagctatcccaacacaaggatccatactcagaactaaccggcttaacaccgcaagactgccacatcaaacatttgatccatccaaacgcaaaatgtgaactcagaataatccatcaagcaacagttgccatacaactagcaggaggcacacccagaataaagttgggcaatatagaatacatggcagccaccacagcccatacatcaccattgaatttgtgtttcataagcactgctggtgcaacatactggatcagtgatatcaatgaacatcatgttgtgagaattaaccaaagttggcgagaagatgactcaatgttagactggttggcaggtaaacaactcgtcttaaacattgatcatgacgaaatgacactgctgatgtggttcaagcaatggtgggcacacatgtacttagatgctaaaaagattgtaaacacaataaaacccatatttgacacagatgggccattctcagcatccaacaatgtgtacatacacgatgtggaaaatgctttgactaatgatatcacaacagactactctttatcagtgactccctcaatgtgtgcaagttttgacatgttagggatgcctttatcagtttatgacgtcaaaaccaactcacacaaattggctacattaacgaaagaaggcggcttgctagtaataaacaaagctagcaccagcaccatgtatatgatggctataattaactcagccattagacatatgaatatggggtggataaggaaaacgatgagacatttgctgtgggggggcgcaagacctttacaaggaaaattcatgatggatttagccaagcacgtgagtgccggggacagaacaggaactgcgctgctgaatgcttttggtagagaattggtggccagtgttaaatacgaacccaaaaccctggtgctgcacagggcggaagatgatgacaccaacaaatttttccgtaaggaacacaataaagaacaagtgatatacacaaccttcactatacccaaagaagcccggttcataatgataacaagggccgtactgcattccttacaaacaactgaaatgaatttgaatgtagtggatgttgacagcacacactgtgtagacatgtcaatatggcactggaccggcgtgtcacaagaaacgatgaacggtaatgtcaaactcctaagcatgttggaacctcacaagaataacagcctctcaaacgcagcaaacatgcaattcaccagtggaccgaagaaccccaaagaacaagaattatctgaacagatggaactaactagaaagaaggcgctaatttcaataaacgatattaataatgagagagggttaattaccaacaaaccaaatagggactgtcctgtgtttattagtcctcaatgcttacaccacgatatcgaagttatagctgagctggtgcattaccacgggtacctgttaacatacctaccaatcaaaagtgcacgcgtggttaaacaaggttcactaagtaacacagctgtagcggacttgcaacacggcgtaacttacaacgtaccgaaatggctaatcgacttggatcacacaaaattggcggtaacttccatgttcgaattaacagttaccgttataggatgcgccaacgggcaaattataatgaggatcaccaggcgccagtttgctgatgaatttaggttgcaaattgatgatggtttggcagacaacatagtcatagtggaagtacctagtgtaagtgacaacatgctggacgatctattgaaaggccacgtcaacataattaaattgaaaatcagggaaggactttggcggcgaatacaaatgcgcatgttaagacctgataccaaactcaatgacttgagagtagctataaggcatttactaaacaacgttgagtacatgataacccatcagagagctgttgaatctggcatagacgcagatgatggcgccagtttagcattggcgtgttatatgatataccatcacaaactgaggagtcatagagaatacgtgatgggtcttgaacaagaatcagaatattacctgcaaagaagcttggatcatgcaaagaaattaggtttaggagttctaggtacaatacttaaagtgctaggggcagacaaagagccgtccgttgttgtaaaggggctgttagaaggcagcggaataagcaacagcttggaaattttgggaaaattagcggattcttgggattcactgttagcaaaggattacagccaaccactaccaatattgctcttaggaggaaaaacaatagccacaatgcaaatgaacaaagtaggttacccaacagaaggcctatcaagcttcgttttcagatacatacatttgggcccaacgttggcaagaagagcaagaggccagtatgatctatacaaggcaccgagcacttcaataccaagagtgacgaatgaacaatacctggctttagagatgggggcatcattagtaccatcaaactctattatcgaaaaactggaagatatgggttggcacaagatgaaagaatatgttaaacaagctaatctgcccttagcggcaaaaacctatttaagctggataatggaacaacaaacattatcagagaaagacgcaatagagctaatgcataagtatacgacttcaagtgaaacagacaaggtactggcaactatatcgaaattacaggatattgtgagattggccttggcttcaaacgtcggaactggatcgacttggttgccggagtgtcaatggctgtgcaaggacttcagacccgcggcagcagggtctgaagctgcatacaaaatgaacgaagccctaattaacaaattcaatagagtagtggaacagtgcactctaatggaccctagctcgatgttactagtggcaacagtgggtttacaagtgtcagcactcttaaaacaacaacccgaacaaaagagaatttggacagacgtgcaaggcatgagagtaggtatagtaactataggttcaacaggagaccatctacccaccttgtcattgtgcagggcattgttagcacatggagccctaccaaccgtttattgtccccgagagagtgctgagatattcacaaatcaaggaatactgactattcaaggggactggagtttagagagcaatctaaaactgtggaacaatttaacgcagaatttgaacgtggaactagagaaaataccaatgactcttgggacaaactggctgcaaggcactgtattcgaagacacccaagacttgtggataagcacaccaattgcaccacaagggttaatggttgccaagcatttcggtagacctcacatctatttttcacccttgccatgggccttggacgtcaccgaaaaagaaaacaaatatttggcagtgttaaaggagacagccatattgatgatgcatggggaattgattagtcattggctagtgacgcacaatagtaaaataaatttctccgatctgctcaaggacacacatcccataatgtattgttttgacaagagaataatatcggggacaacaaggaactataaacctacattctgtgggtacttagggtggaacaacccatggaaaaaggagccacatcataaaggtatagtggtgacttttgggtcaatgataatggatcatgctattgatttagcacagacggcaatgatggcagctgttagtgcaggacaaaggagggtgttttatctcaagaacgaatacttgaacaaagaaatcgaagcaaaagccaaaaagaacggtgtaacactagagcaatggcgaggcgattattatgagaggctaaccagtgaacacgttgtaatacatcatggtggtgcaggcacaacacatgcgataacatacacaggtgcaaaacaattaatagttccggtagcttttgatcaatctttgtgggcacacctgttatccaccacaggaagggccagggcagcattcaggaaacaggacatagaatcggaattggcgctattgatatcaggaccaagaccagcccctctaaacatcgatgtagaaactgtaaacacgtggttgaatgaatcacttcagtcaagcttagagcaccacttcccccatgtgacgattgatgcgtctgtacgcactttcaccctagcgcaggaacggaaaacgccgctcataaaatcaataaataacagaataaacataccaatgggtacaactgataatactattaaactacctggctattactttgggagactgaatgttgaaacaagtgtaatatttgacccgtactcagtttccagaccggataaatgtggctacgattgcattagcttcataacaggatcggatcaaaatgatgtagtaaacatcttgaaggaagcaggtataaaagacgatgtgtacacctcggattatgtggcaataggacacatgttccaactaaatctagtcatcatacatgagggggcagtacacgctcatgtgcactgcccaagttggaaatacgggtacattaaagcggagcgaggccacgcaaccgtaataagcccggtgccattaaccaatctgcgattaatagaccccaacccagtgcagataggtgaagttggctttgcaaacacagcgcaacattgcaacttggggcccacattgcaaataaatgctggccatgaacatggacacatgcacagcacaaacaaaggtttcgtcacgactgtacaagccctattgactagtggaaggtctgctaaagacaagtctttagtatcgcatagcattgttgaagttcatgcagctgtgtcggtgcaatctgctctaaaaaggataagatccaccaatctaaattggcccgcattggccagaggaaatggggaaacccctgcatacttattgccagaaacgaccatgacggacaaagtaggggttttcacggtcaccaatagaaaattgccgctaggtaaggtgctgatacatgagcgggataatgaactgcacgcctcagtagcatggttagctgacggtgcacttggaaagatgacagtgctgataagcaccgacaagttaccaccatactgtgtgtacaatgtgcgggctgtgatgatgaccaattcaactgattataggtggacggaaatggacacggcggtgtacagtttgaggcatgacataaaattagtcaaccaagttttaaaagctgaggtcgcggtttctatccctaaacaagccacggtgggtaccttgtatttgatgaacttcaataaccgtgatcatcacaaagagggcggcttcaggcatgaacttggggacttggctatagcagataataacgtggtaatactaccagacaacaaatctgatgtctactacgtccaacagatgaggtctaaagccaaagtaagtcccagcttgtacatgggcaagcgggtgtactccttaccttggttctacactagtacgttcaaggctcaatcggtcggaattgaccctagcaagtatcacatgctcagtataccctaccatgacacccattatcagtctgtgttcctcaacaccccatgcttgccacatgaattcaaagggaaaagaactcttacagaatgggcggacatgtacgtcacagatgtagtaggtgaaggatacactatagaggagcaagcgataggtttacttagcttggtgaatggtaaatcaatagaggagatatttgacaccatcaacgaaaaacttccacacgcaggtcaaatcacctgggcaaatcaaaaagaaacgttaaggcctttgagtgacgatgaaataattgatattatggtaaagtgcaaaggacgactaattgacaatacaaacatagtactcaggcaaggggaagaaccttatcttgcatgggaacggtctataattttggaggtaatagaggaagcgctagaggaagcagtaagagaaaacgattatgacaaactaagctgggaatggtcagggtttgatagggttggggcaacactgactgcgatgaggcaaggggtccacataacaggcaaacatggcctaaggcaaataacactgggagtaggtttgccagtgtacacgaccactatgtccaagagagacgtaatcatggcaatatacaggaggtaccgtgaactagcaacgagccccttgtatgatattgataaaggcccagacgacttgctggaccaactaagccaacttatgttgagtacatcagagtttgaagtaacggacaagaatctgccaatcgtctggatggaaggagaatacattaaccagagacaaataattgaaaatataaccgagaagggagagcacgctaatttgataatgtcaaggtatttgacatttggaactagtgtaaacgatgatgtcttcttcagcatagatgcaaccttggggaaaaacatgactgtttacctggacacttccaacctggacgaagatgacatcgaaaacataatgcaagctagagaaagaatgatggattatgttaggcatttgatcgtaagttacatggataacaaaacactggaggctgtattcatgttcaacgctgatgatagtttcatgatagaacaccatggtaagttcaggggtggctgttcaccaaatgtttgcaggttaatagctgagcacatggccacagccactgactttactgaaacatcaaagaattactattggttcaaatcacctgcaacaaatgaagagaaaatttatgaaatgccgttaacactagtaacaaaagacgttttgaatagatcaatttatctggagatagaaccgaggctgcgtgacccagaagacttcgactatgaacttgcggtaaagatttactccatggaagacgacactcaaactgatgagtattatttggaatatgaagacatacacgatttgctgaaggatgaggtaaccaacttaaggcccataccaggcacacttgttaaaatgaaagtggactcaactgagttcatcgtgggcaccttgatagagaaattgatagaaggtgactataagcaagctgctggtttgttgatagcacaccatatcgcacaaccaggtcacactcctttcgagtataaattagatctgaaagggatagaactgtttgatggagacctaacccacgctggcacatttggcagcaatgaatgggaaggttggcagtcgatgacaaataagtgtggttacaggccagaagagtcaaatgagtggagaaacagtgatgtatcagacatgcacaatttggattacgaaagggcaatgcttagggtgccacgaaaacctttaagtttgctacacattaaagctatgcaattagggaccttaatactctcagaagaattaggggttatagaagacacgttaataaacgacaagcctttgttgataactgcaggtgtggctgggaaacacaccctcgagttggaaaaccaacaattcataaatctggtgccaagcctaccagaagcaaacgatgagcacaacggtttgtggttcaagcctccaactgtatggggtcgcagaagggaattggcgctttggagattaattgccttaacaaccgacatccaaaaagtgagagtgaccaatggtagggacttcggcaatctacccgaaccatcaccattcatgaagtacggggtgatagcgactataccacagggagttgctccagtctacttaggggatgcaagctttgagagcttcgaactatccgctgacttcttgttgaaacacatcaacgctgcaggagatttgtatggaacagatgaattaatgctaatgaaggtattaatggaaaacagacgaatgtcatctatggtgataactcctgataagccaacgtatagcttgaaagcatcgtggttcaccagaccagtatattgcatgaaggaacacggggaggattcgacgccattaaccaggggctactcctcagtgcggccaggtgacatagcacaactacatttaccttggcctggtagcaatagtccttcggtggaagatcatataaacatttgttactggagaaaactagtgcagcacacacccacaattgtgctgtctgacacactgcctcctgtaatggacgcacctctttggttcaagaaggaatcatttttgggagtgaggagattcatagtgtcaggaagagaggatgtgacccaggattattggcgacaaaacacaaaaagtggcgcaaaattagcatgcattgacaccaaccaagtgttgagttgcttagattacgtgttcacgagtaatttggactttatatatcaccaacaaggaaccacattgttaccctacctatacgcacaacagttaactggtttaaagggtatattagaggagaaagttgggctgatggggcaatcaatagcagatgacggtgagcctgctgacgcattaccggaagcaaaagatgttagacgcatgaacagggataggatgttaacttttgaaaatgagtctatcaagaaaatgttatcaattggggtgccagtaggaggttggaaaacaacgctcgcaagagagcaccctgaaattttcgctgatcacgacgattacctagatcaagagaagcatgccgctttacataaagcaggagaatgggataagttatctattttccagaagaatgctgttataccaaaggacagagttttattgacatggggttccacgacatcaccagacaacaggacttacctgggttcagtaataaacaggagatctgcaagagaaatgggtttgccaattgaggagtacaggctcaatttaaacgaagtaaataggatcgggctgatagcagagggtaactacaacatgataagcacatatgacgagtttaaaagaaaatgcttaggattggtggaggatgccctcatgggggatataccggcactcagggccaacatggaattagcagatcttgcgatgatgactttcagggacatagagtatgatggcagttttggagaattcgacagtagggacttgtacataccatacataccaccaataattgatgaaactcatgacgagggaattaaaccagaactggaagataccccactagacgtgatcaacttgtatgaagacaacgatttaacagaactagtaagggtgatggcacctggttctgaaccattcaggaagccagtgagatcaactgaacaggctttacgaatagttcaaactatgaaacatacattaaagaaatatccaatacgatctagggctgtattgacaaaaatggtgtatggtgaattaaacgccacaatactccgcatggaaaacaaggaggtaataaagaagatagattgcaatccagagtatgaagccgacctaatggcggaaaccttctttaatttgaatgaaatcaaatatggaaccataaactacaacacagcggccacactggaatggattagagagcatgatggttcagcagagttagagaaggaattgcgagagattctggatgaaggattcttggaagtaccattgaatagggtgaatgtgcaccagaaattggaggcactgctaaaggggttcccaactaaggcaataggacagatgcgagaacagcaagttaggattattgtatggcaatccaaagccatggccgctatattcagccctgttttcatagaagccaagaaaagattaaagaaaatattgaaacaacaagtattgtacgctgatggacttagaccagatgagctgaataattacctgagaaacatagaggatgataacttattctatgtagaggatgatggtaacaaacaagataaaagaaccgaacaccaaatgttattaactgagatgatagtgtataagaaatacttgaaagttgctgaccatatagtggacttatggtatcaagcacacaacgcatggagttacaagggctcatgggtaagaggtattagtgacgctatgcgacaaaccggtcaagctactactgccataggaaatgtcatagttaacttgatagtgcacacaagactcgtgagaagcttaggcaatgattttatatgcatgctagtacttggagatgacaacttaataataaacagatcatgggtcaatgcaaaagaacacgaaaaagactccgccttgcggtggaacatggtgcaagaatgcgagacattgccatcacacggaacttttctgcagatgatagtggggccagatggcaacggacgactgcaggcatcgcctgattttataagattgcgaaacaggtttgaggtaactaatggagtgtctagtaatccggaaaacacattggaagcaagaatactgagttacgcattgatgatggggaaaactgcaagaggtgaaaagataataagaaacctaggttatgaaactcccttaggcaattacttcaaccatgttgcagcaattaacaattgtgcagcgaggcacggtgtgaacgccgacctagtcagaaatgaaattaatgacctatatacgatgatggaaaacaaacaactgatgacccagacatggacacactttacaggtgtgagcagattttaa

SEQ ID NO: 1242 - DNA, 1011 bp, Rhizoctonia solani endornavirus 3; identical to SEQ ID NO: 905
  source 1..1011: mol_type = other DNA

SEQ ID NO: 1243 - DNA, 20160 bp, Rhizoctonia solani endornavirus 4
  source 1..20160: mol_type = other DNA
atggaccaatcaaaccaagaacaatacacacacacacacaatcgcctgtccactcctctccccccggtggccggcgattttaataggggggaaaagcgcgacgccgctcttccagtcgcgcatacacaaataaacttaatggaagagcacgacagcaccgaggcaacaatcgtgcctcgagtggaaaggatcaaaattagatccaacaaggcacaaccaataatgatcaacaggaccgttgaaagggggtctttctgtctgcaacctactagagccgttgaaataccgaagaaaccggcgagtgtacgcactaggatagtggacgcccgagagaccttgctcgtcggtggcgatggagactgctggtataagctgtggcagccattgaagcgagctggcgcagtgaaattgttccaacgtgctgcaaaggcattcgttggtgcaaacccggaaaagtacccgtctatagtgtcacaaaacgcggaagcgaaccaaccgattgacctcgagttcatcatcagatttgtctataaaaattcgtacatggtaatgaatcatagccggttggtgcgctggtaccaagagttcagtagagccaaacaagccggggaccaagttaagatggacaaattgaagaaagttaagcctgaggaggacgccgtggagtacaatgagtacgtccaaaccaaggatggaccagactgcaagatggcggacctagtactcgttgcattaacggagacagctgaaggattgctacatatagaatccgtcgacgtttgcggtgaccgagagacggcttacagcagacttgacgaagatatttacccgttagaatatttgatgcaaatgttcatcaagaaacgcaaggaacgacaactacccaatgacatccgagacgaagtggccaatgaagccatcaaatggcattccagtgggaatgccctacaattagcgcacaatcaagccacccagcttcaaaaattgaacattcgaagttccatggaacgcggtttcaagaccgttttgttgcaaaagatcatgcgcgataaagttaaagtcggcgtgtctgcttcgtacctaatgagaagtaaattcatagaaaaccttgaattcgcactcgatgacactggcgtgcgggagtaccttgaggccgttacagaccatgatatgagagttgtgaataacactttcgcgagagtgaccttcaaccacctccgaaccacgcagcctgacaaacgttgtgacatctccagcgtaaaggaactcgactccttgtttattatgcaagatgagataactcacgaggaacccaccgagcggttcctgactgacatttgcacggccttcacattcgtcaacactgaccccgaagttacaaactatgatgaagagctacttgcaggcttgcactcacaaccgtattacgccaaatacctcgaaaaactggacgaagtcaagaacgagcatgaacgacagagaaagccactcgtacttgtatccaagcagcccactcgagaggatttgctgtcttacgacctcgtgtttttgatcggaccggttattggtcatgatagtgagggcagcttgcccaacgaattaggttattacaaatggatgaacagcgaagagtgccattattcatttgccgacacaacaaagtccaagtcttgtggcttcttgtcgggtgtgctctgcgggtcaaacaacgtgtctgtaaataacagaagtgtcactgtcgttgctcgcaggacatttgacgccatgcaggtggttatactcaccagtttggcttatcagggtgtccaagtggctgagtctactgtgcgggaatttgaaatcccggtaatagcaccaacctctctctgggccaccggaatacctattttgaaaaccatgaaatgcaaactcaacaacgtccttctgaagaggctagtcaataaaaacctgacgggtaaagtttctaaagaactattgttagaatatggaatggcgttgagttggtattcatacaacaaacggggtgttgagatctctgaccacaagctcgacccttgggatgtaaaggtgcatgtgtacgtagccatggtgctcacccgcagggaagctctcgcaacggaattgcagcaccaaataaccaaaccagggttgaacgctgtcttggcgtctttcttagccacgatggtcgaggctactatgtcaaacgttgatactaaagaggaacgattccaaacgatgatcagcagtataatggacaagttaaagactccgaatatcaagagtaacaccggtgtaattcttaaaaattggatgtccattgacttttggacgttgagagatgaatttgaagtgaacaaagccagcgccattgtggcgtgctcacatcacgcgaaatgcccattggaagtgactggcaacatgtgcattgactgcggttatttaaccgcagcagagggtgaagagtggtgcgtgtgctgcgacattcttgtatgtcaacacgaccggccggctgaccaattcggagacaaagtttgtgactgttgtggtgacccaacaaatggaactacttgtgggtcgtgcgcagccatcaaaggagaggactccatcaccaccatgcacaataacactgcatgctacaacttcagacctaccaccaccaaagccggcgatggcactggacacactcatacttgtgttaaatgtggtaaccgttactctcacagtcacccttactctaacttacaacatttgcaaacattagaagaatgtgactggtgccacgggaggaagaccaccaaggaaaaagggaagccaggcaaggcagaagacaagccgatagtgaaattcatcaacgcccagggtgaggtcgtggaatcaacacccgcccagcccacaaaacaaacattcgccgaagctgcgaacagcgagttgcctgtgcgagcaccgatagaacttatgaatctcagcgaatatgccgtttatctgccgcaaaacgccgcagccatattaatgggtgagatcgctgataccgagttgtgctggttctccgaaaccgaaactagtacaatcccatttgtctgcatggaccatcccattgaaccagtgtccaacttcgaagtgatcgttgagtctgaggagtccacagatgaggattgcggagtagcttgcatcaaggcctacgttggagcggaatacacacaaaccgctggcaagttagtcacggggaagactaagctattcagtgggttggatctcgccaaagttctgaatcaatacggcattaacgcttgcatcatagaaccgttgggcgtggttttcagtagggctaacgacagcgaagaattcgcatgcatcatgcacaaagatttgagccagacacaaaacgtcgaccactgggtcacgtgtaagattaaaagaattgcatacgttaataatgacaagtgggcaatgccgttattctcgcctcggcaacacaacatgcactctactaatctcaagaagaagaaatatgaacttctcgatgatcacgacaaattagatctagcattccgagttgtttcatcgatgaccatcactggatcggacagtgaattcgtacttgattacgatcgaggcaatttgacgaacaacaaagagaagaaacacgatcctcaacggggaaaaatctctttccaagtcccagagaaattccaagaggatgtgcaattactagtcaactgtctcaagaatggagctgttgacgataaattcaatgcggtttgggacaaaatcggggaattgaccctagaatttgattacaacgtaagacactccttcctgagtacgtgtctacaactgacactcaccttctcagatcctgaaagtcactgcaggtctggtgacgccaaagtcattcagtataaaggtcaccacgtgatcgatttgtccaatcgcgaccccaaaccaggagatgttgtgttcgtcagctccaaaggcaaacaactggcatgtacagttgatgcaaaccagcaaatcaaagtaaagttgtccggcacagccgtgagggtgaaaatgttgatacccaaagcttcggttttatctgcactaattcacattttcaccaccacaacagcctcatttgatggagccaagctcaaatcgctcatagaacgcagttcgggtgctatgggtgttggaggagccggaaagagcacacacatagccgagttagctagaaagttgaaaaacgaaaagaggaaaacactaatctgcaccaacaccaataaaggaatgcgatccttgaacgagaaactggacaaagacttgcttgcctacactttcgaacgagccagttaccttaaaatcaaagcaaatgtggtaataatcgacgaagcaacattaatgtctccatggcaattggctctaattgccaacggaaatgaggacgatttgtacgtctttggtgatccggcccaaattgaatttatcgacttcagcaaatccggcggacacagatccgagtcaactctgatggactattgtcaaaagtatggcaacattgagcaatggtggacatcccatcgatacggcagagatttagtgaaggctttaaagttacatccgaaactggacaaacttgaaacggacgctgagcataataccgtggtagaactgtattaccatcataaattcgacctagacatgatccgaccgctaatcaccggtatgaacttggttctagtgcattatagagatcaaatcaaacgcgtccggaacttgaccagcaacgcttccattatagaagtgacaacaccgcatgggtatcagggaggtgaagttgataacgttttagtcattcaatgcccggagggatctgccactacacatttgcaacctggccacaatattagtgcagcaaccagagccaggaaaaagctgagatggttgtccataaactgcttcgacgcccaaaccccattgcacgagaggttgggcggcctcataggcaggaactttaaacttgattttggaaccgtcaaacaagtaaaggtcaccacggacaaaggtgaagatttggagtacaaccttgaattcgagaaggtacaagagcgtatcggtcaagcggaaatgcctgagaagtactcggccgaaaacttcgactttccactcttccaagacctcctgggttcgttcacaaatatggcaagggcaaccgattttgaagtgaccggaaataaggttacgttgaaagcaacttcgatcggaatggaagccacactgacggtggatctcgatgaactcacagtggatggtcccgtcccgcacagccggaaaaagaatttgttaagcctggtggcttggtgttgtaccggtggaagtcatccaaggataaccagaaagttggaccacagaggatggtacaggtgcagaatcatagcattcgtccataaactgtatgacacacacaacaagaaactgaatttgaagggcaaattgaacggttacaccgtgaccactaaagccaccagctgtgcggcttgcacagatatttacttcgaaaaagatggacgcgtcactcacgtcgaggaagattacatgcgcagtgactctaggcacgttgtgggtcacgaagtggaaaaaatctgcgaagtgttagagagcccagaaacgtgggacattttgagacccgaacttgatgatgagaacctatctcaagtgatagtcactgagcgattcaatactgctttcactgaagtgttcgcaagcggtaaacccactggaaacgtaatgtggtataacaggtacgaaaatgatagtattaggaacaatctactccgaagattcaatgttgaaattaagactagtaagcatgacaacatgttctggtaccacatcagaatccgcaaaggcatatcatggcatgtggaaagaccagttgacaacaagacgagagaggttatcaaaaccgcgcgcaaacccagtgtgcagactttggcacacgataccctcctgtccatgcttggacattacagcaaaaagagagtcgtgggcctagtgtcgaagatgtacactaagttcgtgggagcagcagatgacaggttgcctggaatggttgaaagcattgagtatcataagcaaaagaaaacaaaagtcttcacagctatttctggccgagtaggcaagctaatggtgacatcactcaagaataaaaagcccatggtattagtgtgcagctcggaatacaaggccatcaagaagtggggcgtaaaccacagattcggatccgtcaatagcgatcatgccctttccagcccagacaccgcatctgagttgttggccttagtcgctgtgagtacagggctaaatgacgcacaaattgacacgtgcttcacgaattgctacgcccaatacatctgcggaaccactggcaacaacatacttactaagcaggatctcaacaacactctgacgtcgtcacgtgttctgaaaggattcttcgataaggctttgaaaaaccacctcagcagagttccagcgaacactgaaatatatcaatcgctgatgcaaaccttagccgaccccgttggagccaaaacgcaaagcagcaatgtactagtgaccaccatgtctttattcggagaagattcaacatggtatggggccttgattaacaaatacgagaaggtgttcatcatcctgcccatgagattcaggatgattgaaggaaaacaatacactggatttgaagggtctagtagggtatacgaagtacccgaattcattcgcaagggtttgaggtcaaccccagtcaatttaggaaacaaaaggtatttcgtgcacatctgccgcgtaattgacgaagtatgcattctcgaactggacgagaacaataaccactgggcatcccactggagtaccaattccagatacatatggttggatgtaccttcaatagtattggacccggaagaggtgttgaacaataagaagctgataacttctgtcaaaaagagatacgacgttagcatagtagccaatttacgcaggcgtgccctaagatcaggtacgacggaaaatgacctgatcgtacaagcccgcacattggtcaacacagcacagttctcaataacgaacgtcttcgataaatacgacgtccccgtccacgccgcaaaagatgcggtgaaattagccctgcacgtacacgaaaccgaaaatcgaatgctcagtctcgtatcgggtgacggttgggctgacgatctcaagactgtggggtggaaagtcatttccgacatgttaagtaaattcgtgccaaaccacaatgttgacacactactagacaaactgtcaccgacacgaaaacaagccatcattgagaacataaagcccttcttcgaaaagttagctatgttgggacccgtcctgatgcgggataggaagatcttttcaaccaaatcgtctgacccgtggttcaacactcagttaaaatattggaaggccaatagaacggcgtacaactttgagccaagataccaaatcacgagcctgacatattgcaattgtgacagctgctcgacagacgataacatgctagaggccatccacttatacgagttggaaggaaagggttgcaaccccaccgtcaatccatcaccacaatacactctggtaagtaccaactgccccaacaggatatacggcaccttagtcagcaccgctttcgacgcacaaccattaaacccggccaactccggaggcgcttgctgcccagtaaaacgagccagaaaaaccgtgcacccagacccagaacaacctggaaacacgatcgaacatcccactggggaggtcgtctgttacgttgattgcacggttgaactcggggccatgcattggagcacctacgcgacaattgctttgtcaatcaattgcaccttcaagctaacagagggtgaaacattgagattcgccagtgaagagaacgaattcgttgaagatgggggacgtgtggttggaactttgttggctaaaaacttaaaggagtacgaacaactcaacgacgcaactttaaaaacaacggagatcgggaaaaaatacccagacgtcgtggctgttaacaccgagacgttaactccaattgtcaacaggaaattctccagagggaagctgaacgtcatcattccttgcaatcatggtaaaggattgatcaaatacctgctgaataagtgggccagcgatgtgtccgtgaagatccatgacgaatcaatgatatacactagaacccatccatttgacatcgcggctttcgcaagcagacatgacatagtattagcttcagacatgccaaagggtgacgtgagtatcagcgtgatctatgctggtactaaccaatcgctaggtgatcctggcgacacaagatacagatatcacaaaaacactgaccgagagtacttggaaagtttcaaacgcgaggactgcggagtgctccactaccagtggagcgacttgttgcaactatccaagatcgttgaagaattgttcggagtcagattgcccatgcaaaagggtatagcggcctgtggccatgttgtatataaagtgaaagatgtcgatgctgcactgggtggtatagcttgctccacttgcggtttcgaataccaaaaatatgaatttgtttatacatatggtttaatcgatgaaatccgcggttctggtcaatacgaggtcagtgaatggaaagacatgaaccagaagtcgacttaccgagccgaagggtccgtcttaatcaatgctaacaagttcgactccgacgtgattcccaacattgagggcatggagtatacatttgtgagaaccaaggacggaccagtactactcacaaagcaggttatcgacacctgggacccggtgaacagcatcaaaatcttgtccacttcgcacaacagaataatagtggaggaaacctgtgataacaacagccggtggtacgaagagggggaagaaatacaatggtccacgttcggcgacgaatttgaggaacttgagtacgagattgttgatgccactatcactaaattgaaggatttagaaacagtcaaagccgagtattacttgtactattgctccaattgtagagccgggtatctgtgtggaaacaataaaaaggccgggttgtgcccgctaatgcacagcctcatccttttgtgtggacccaccggtaagtccagaaccggaagcgtaccgtatgtgaaactattcgaggagcccagcgaattgacagagcaagggcaagtgtacttcgacaaccttcgctcaacaatgaccaattacttgcaagatgacaacaccactacgtccaaggtgggtgctgtaatcacggaagttaatggcgtcgacgaagaagttccgcaaagctctacaagaccaaatagtcaaccccaagacatcacgaacttcggagcaatgataacaagtttcacgaaagacgtatacacagcccagacgagggccaatttcgaggaagacggaactgtgcacgtcttagaacccctgaatttatcgattcaagacgaagaaaacaaatcaaggttgccagtcccggttaatatgtctgctgtcgacgaaataagcatgcttatgaacttgttagagatttcgttcaacgagaagctgaccgcagaaaaattagaattgcacatgatgacggtgagctgtttggctatgagaattttggccaagtccgcgaaggtgagactggctaggcaagttgacattaacagagccagcgactctctaagacaacaaatgctaagggaaagaacaggcatgctgaaagacacgatagagcgcctacgtgatgaagacaatgcttcggtcgtaactttctgggttaatctaatcaagcaaaccttgcaacaatcctggtcggcgagaaaaatgacaattgattcattatactccaaaatctccaacggaaatttactgcccagagacttagtggaaatggaattaactaaattgtaccacagcgactacacagttaccaaatcgtacctgtgccaagccggggacgatgaagaggtgaacaaacaagaggttgcaaaagttggcggaaacaagacattcgccaaatatgcaaaaatgcagaaacgcgcggacaaaatattcgcaatccaaatgctgcgatcattcactcgtagcgaggtgttgcgagaaatggcgaagagtgaagagcatgaacacgatccggtcaaccaatggcaaccctcgttaatgacaatccaagaagacgacgatgatgattacaactcgtttgagtactcgatgacccaaaaacagttacttgactccacttatacatcagtgatggttcatttccgtcagtcagaaatgcccaaattaaataactggattaagaaaatgttgttgctgttaactgggagaaaagttgtcataacatatttggacaacgaacgtaagttgcaaatcaatagttggagaactgaggaggaataccgtgacaacaagagtttcttgagcaatgttaggagccgcggcatttacaccatcgtggaatccaatggctcactgctgcccgacgagccaaactcaccaatggctttggagtttgtgaccaccccagaagtggctgaaaccttgtgtgcaaagacagcggaaatggccgaggaagaaaaattgaaattagacgtgaacgtcgaagacgttcaaatccagtacaaaccgctgccggagaattctgttatggccacagatgtttacagaagccatcttatgcattcgacccccatcgaggcgattgaagataacacagataacacttacaaggacaaagcagtcgtcgaaccaacggaagaaccagccggccttcaacctgaacagaccattggatcgaagatgtcagatgccgagaacgagaagataaggaaaatcttcgaggaacacagggctttgaggggcaacaacgtgcagatgatgagcttggaagcccaatcaaacaaggaaagattgaacaaacacaagcgtctcataatccaagctatggaggaaaatgggttcaacttaagtcatgtgaacaagctgagccgatgcgatccacagaccgtcattcaggcaatcaattggctgactggggaggtacaactcggacgcatcagcaccgaagaagccgaaggacaactcagatcagctatccgaactgacggtagcttcaaatttgtcgtgaggcaattccagcaattgaacgaagtagcggaaatcgaccaattatttaaggatttgaaccagttattcaatctggaatcgttggaaatcgtcaaatcacacgaccaacctggagcgatgatggatcatgacgttgaaaactggataattagaaaacacaacaggattttggccgaagctttcttcaaaaatcgtagggagtggcctcacttgggacctgacccaagcgtgagaaactggatcgacttggtcgacatagacagtgacactagtagattcccaagacatcctactatcaacaaaaataggcagatggtagaatacaaattcattgatgaggattcagaattgtcccccatagaggcagttacggcgaaacttttccaattggaagttggttccggtatcagagccaacgtcagatggaacgatgaggctgccattttgcaatgggaggtagggagcggggtgtggtcaccatcgaaatctgaaatccaagaagtagttaattgcgggccagtcggaggcagtgttgtcaacagctggatgaaggatccaaaaggcaaagggagatacaagcaaattgaatcaatcaaagaagaatcttatgaccgcacggccaggtgcaatgaatacgacttgctcattcacagcggagtatgcaaactacgcggttcgatgcttaagtatttatccgacaagggaaaaatgaaggttgacaatcgcggaggcaaagtggccaccagcagcgtagttactacgaatgcgatgcgagcggcagaggcggcagagaatgaccgttttagcactttgatggaaaaacttgatgactattgccaaccattcgaggaggcatgggcatcacacattgagccggagagagtaactgcaaccgctgtccccacgataatctgtttctgccagatctgttgcagaggcaatctgaaaaagagtgaccacggcgctgtgccgaaagagtgggagtggcaccaccaaccggcacgatctgaagaggatagcaatccagcacgaattcgcgcagatgaagatcaagcatcccacccatcctcccagcaagagggtaacacgccttcggccagtggagagagaggcagtgaaagatctgataactcgttcatcaaggcttggcgaatgggaccaaacccgaggtcgaaaacaccatcgtcaagttcgaacgacggggaatccgaattcgaagatgcaatcagcgaattcacagaggaatctgattacacggtcaggcaacaggaatggaaatcgttacgaccggcagtggagccccaggaagtaggggtgaccggagagagcactgacgattcagaccaaggcccactcgagcctaccgaggaaactgtcggaagtgttgacatggacacgactgtagccaagaaaccccgaccaaccactggggtcacggagccggtggagggggatcagtcagtcattgaacccaccgagacgaaggcgagaccatacaaagatgtagttgaagagcaactgaacaaacagttcccaaataaggagaaaccgacgccgaagactgaagtccacgttccagatgggcaaccgctagccgacctcattaccaacagtctgaacaatgtgcaagccgagagagctgcgtacgaacacagacccggagcaaaattcatcactaacttagatcaaatcctcggatacaagagaattccggaagcggagcaagaaattgcgattcgtcacagtgacattgacgtatggtacaccaaaggactaaccgccaatgccgcttacggaatgcgattcagatggatgcgattccatgggtgtcacacgtatggggacctgttggattggttcgttaataggccatacaaacaatggatcaatgccgcaaacgctaaatggtattcattcatagcagagtccacggaaaaattcctcacacgaaatggtgtaacgtacgctaaattgtgcaagaggaagatcctaccagtgaccatgcctggataccatcttaacgggaccacgatttacttagactgcctgtcatccgaatggggcatttgtctactagccatgtcggtggtactagaaacgatgcaaccttgggtatttaaaagaagtcccgacggatttgaaaccataaacccgacgatatatgacttcagctgctgcaccaacgccactctgtatagggggcaaccggacagattggcagcactcgaacggagggagagattgatggccacggtggtcgacgaagtcggcattgacgtacagagtcctaattccactgacactaacagctttgcgctggggttggccatgtcgtcagacggcagatttatctacggattggccaaaaactgctggaacccattgagaccagccatatgggcggctcaacacggagtacaagaattgaaatgggtgagcgatctgagagtggaagtgcacgtagctccggtgggaacgaagaggtatcactcgcatttcaccagttggttagggttacaggactcattgttaaacggaaagatcagcccaaaatggtattctacggttaacgccgtggcaatacgcaggtacccacaggaggtcattgcaaagtattacaacgagaccaatttacagctgatcgccaccaggcctaccataaactgggggcatttcaatccatgcttcagacatcagaggaccgtgggagagcaatgtgaattatgcgacctagaaaaggcgaacaaaactgaaccaattggggtgcctaacactctgaacacggttaatcgtctgtggaacccaatcgatccgtgtgattcaggagaggaagcctggtacactaggtacatgggttacgaaaagaaggacaaaaaggaaggtgaatccaaacgtgctactgctgaaacagtggatgtaaatgaaattagtgacccggaaatggccaccatcggattcgcaaaaatcaaggagcaggtgatgacggatttgacagccattgtcactggagaatccggcttacctgaatttgttcattcagagaggccgatgttccgaccagctctaagaagaatccaacgctgggagaccatgcccagggccgtggaacctcatccggcactttcaatcgtggagtggttggatataagccaagcacaattagaagccgaggaaacaacgtcgtccctcaaattcgaccccaacggaggtgctggcatgatcattccagaggacttggacgtgtctgctagtcatgccggtggcatacaaatgtgcaacactcctaatgatagcgaaattttcgacaatcgacacaatgcagctctcataattagtcacgaatccattgtaaaggcatccaacccaagtgtttacaaaaacagggaattgccggtatgggcggagattgacgatcccatgttgccgactgaccatgacgtcgcaaatagtatcaaggtaaaactagcgactgaattaatcgcccacgtgcaagaagtggcccccccaatgatcgagggtgccggaagtgggcaagatgttgtggacctagttaaacgccgaccaaaccaaccaatcgcggggtggcaggttgtgaaattggcttccactggaactgtgaatccaagtgacaggggagtgcaagaacttggggatggtgaaaaattgttttgccagttattcccagaagtgcacgggaccacaatcaaacatccaatcatggatttagcagacgaaccattggttagaaggccgctattccataacccgttggtgcctaagaggttcgcatatggtagagacattctttgtaaatcattgttgcactgggtggacacagcggctctcgaagccagagggttgaatgaacgaaccaagaagtgtttgatcggcatgttgctgagaatcaacaaattgcaaatcaaggaaggcgaaattttgcattggtacggtttgcacgaaggcgtagcaaccagaaagcctggtgtaggcaaaggcaggcacatatgtttcactactcaacctgaaaagtatcagcaattgggattcgagacggtattgatcgatgccgaaccatacaggttgggagcttcgttgagattaatagcgatcgccctcatgcataactttaacgttatacacgtacccaaaggcggcagggtaactctacacagtttagcagtggaacatgcggttgcgaagtacctcgaaccagtggaatgggacgcggaaaaacgacgtttcaacaacttgagattctacagggcaggattcaccatgttctcgtcctacagcccgaacatggacggaatggtgttgctcaaaccgccatcaacaatactccaaagtgtcattcccaatatagtgaaccacaaagtttatggaatagatgaatgcaacccaggctggttcgatctacaagcttgttacgtggctgaaggcacacggaacacatattctaacaccagcaccctatatgattatttaatccagggtgtaatgtacttggaaatacgaaaactcctggaagatctgtcattcccggtcactttcgctatttcgagtacaaatgacataaacaagtacgtcaaattggcgtgggcgttagatcaacattccgttgaagttgacactaggaccagtgacgacgttgctccagccccagaagttgtagcatggatggcgaaacacgtcagcatcggcaacaaaactgcaaccgtagacagtctgagcttgcttcgtgacattgaacaagtgaaccctgagcaattcaccgtgatgagcgtgacaaaagaaggcgacaccgtcaaaatcacgaacggagacgcaaggtggagaaccgcggcaaactcggctgccgtggtcatgcttgcaaagaaacttggattgactggaattctgagatctaactgtggaggtttaacttggagaatctacgtattagtggctgacgatttgttattgaacgttggggacgtcaaggaggcgagtgatctggatgcgctcatggacttgtcgcgaactcaagtcaaagacccagccaatcgatctattctgatcaacgctatgagacaagccggaaaccggaaggtcaaagccgcgtcaaaagaccccactcgtagccatgaacgagaccaaaggaacatggaagacttcgacccagtgcaaccatcccttggacaatccccaatctcgggaggtttaacgcacaacgggacgaaaattctgtattacccggactcatcagtattcacacttagtctcggaacggaaaaaatccacgtatctatgagactttgcaaccgattgattaatgaaattaatgatcaattgttgtacgaaaaattggattctgtgtggctcccgaaagcagacttcacagccgaccagtgtccaattcctgttaacattcaatggtatgctgactcgtacaagaacaaaatgattccaatgggtgacataatggcaactatcacgcaaaatcatcaggccagcctcctagacaagtcaggggagcgaaagtacaacagttatttgacgaaagtgccaattccaacgaagaacttatctgagagtgacgttacaagccgatctgggggattcgtgcgcaaggtcaaaggtgacaatgcgtaccaagtcaagacttttgatttgggatacaccaaaggttatccaatcagggaaaaatttaacgtcaacgttttaagagtcatttacagcccacgcggcgcagacgggtgtgcacctgccgtcattaggatgttctgtttgcaagtggatcgcaatgccaatgtagatgaattgatgcaattcttacccgtggacgcttggagttccgcagagaacattgtggcatcactcaacctgctaaatatcaaccacaccattgtccgaaacaacgtagcttacagcacaattaacaacaataccaaccaattcttgaacttagaaataattaaaaatagtgacgggagtgaccacatacagatggtcgaatttattgcgaagggcgcgagacaaccgatagacttccaaagggctgccatgactagtgaattcaaaacagcgtttaaagccttgtcagacgagctgaatagcaaagaagcgtacattaatgattccaatgtgaaggtagacgacccatcaccatctttaatgaacgctgccattcgtgccaaaggaaatccacaccattacttcgtaactaacagcgagtttgcggaagtgacatcaaggctgggtgaagatctgtgggtactcagcggttccacgcctggcagcatgtacagactattgacaccagacggaccaaggttcgcactcagtttcaagataggaaaaatggtgatgttgagatcaggcactccaccagcccagcacttgaaaccctggtgcaaagttgttatggctggcaagcaacctggaccacacagggtcatagtcccaaaacaagacgcaggtttcctgagcaagaaagacaagacttatgccgtgcacatgcatccgtccatcggcaatttacctgtgaaacccgaagcagccgtgatttatgtcagtaattggagcaacagaaaccatcacatgttgcgtgaacgagacatcatgatgagcaagacaaaggagcaaatattcataatgcatgaattaaaaatagaaccgatctccaacgaatgggatcaagtgatcagaattgggggtccgttaagagccgaaatcatagatggcaaaattaacgccatgtggtgttgttggtacgggaacgcaaagaaggccatcaggttgttaaatgaaggtccgcttgacgatatttatgagattgcttgcttgtgggacaacaacaatttcgtcactatagggaacgacatcatccccaaaggcagcgagtggaggtcgatgttcgagaaaaagacagaaattgaaacgacaggccaggaaataaaacaactattggaacagatgggtgttgaaggagcggataaagttaagatagaaggtaaatacaagctaaaactccaggaactcgagttggtggagtattggttgaaccccaactatgaaatgctaacccccggaaagttaatcagttgcaaacatctctgtaaactcgaatggtcatctttcggtgcaggatacatgagttacatccagaaagaaaccgaacaataccaaatcgatgaacatgcggccgatcgattcgtgaattatgacgacatagcccagccgaaaaagcaggggcaaggcgacttagacgacaaaatgcaacaagccaatttggatcaagttactgccgcaattgacagtttgtcaacattgaacaatttgagttttaacgacgaatctgacgtgtttaccattgtcagtggagacgcagagcagaacgcattaatatacggatgctccacaacaactgaccctatcaacggggagattacaaggaccagcgtagacccaagaaccatgaactattgggacgacgagacagctatggttgacggaacaatcgagctgccatacaaaaatatcaaactacaagtatttgaagactttaaaggagtgacccaggaaaagaaatccaagctggcggactatccgagtcacagccagcctgcatacaccaaaagatacatggcagggacacaggcggtatcagacttatttgggaaaactctggagttgagacaagtggctcacgatccggtggcagacgccaagttgtttgcacaaacttatttcaaagctggatcattgaatgccttgcaagaagttggcctggatccatcagctatcaaagagtggttgcttgagcgaccggacagcgtgaagatagctgctgatgtgctggatctgctaagtggtggtttggacgtgttaggacttgacaaagtaaacgtccacatgaaattggaatcgagaatgaaggatcaggtgattcatttgaatgacttgctgaccatggcaggtgacaaccgcatgccggagactatcgaagagcaaagagtaagattgattgtttggcagaggaaggggatcgcagccatattctcaccgttcttcaagaagttgaaagacaacctcaaaaggtgcttgatcgacaaggtagtgtatgtggacggaatgactccacaacaaatcagttatttgttgaataaagttagcggggacgtgatgtttgcggaagatgatctggccaaacaagacaggcaaactgaccacactctactcgacaccgagatggaagtgtacaaactgctaggaggaaacacatcaatcatcaagttgtggaggaacgtgcataaccattggagagctaagggcgtgggagtgaaattcacaggagacgcaagtcgtcacaccgggcaagccacgacagctcttggcaatgccatagtgaacttgatggtcaaaaggagggtcgttgcggaacaagggaaccgattgaagttgatgatggtgctgggtgatgacaatataatactaacggaagggcccatcacggccagcgaaataacattaaacagtgccaggcatttcaacatgaagtcggaagccagtgttaacaatcacaacgggggattcttgcgaatgttaatttataaaaataatgtcaactccttggaatgcggtccagacatcattaggttacgcagacgctttgaagtgctgaacggcgtgcacgagagcaccgacgagaacgtgacaatgcgtgcgatgagctactgcatgatgctggggaacctcaaaccagtgcaagaattgatccggaaacataactggccaatcaaaccaagtaggtggtacgattaccaagccctgagcaatgggttggccatgaagtacaattgcaccagcgaagaagttgacgtggagttatccagattaatcgacatgatggatcgtagggaggtcaccgaggtttctaaactgatgttcacggggaaatcattctag

SEQ ID NO: 1244 - DNA, 15903 bp, Rhizoctonia solani endornavirus 5
  source 1..15903: mol_type = other DNA
atgaaaactgagcgacgagtacaacaactaaatagttatttgaacatcgatcaaacccgatcggcgcgtggccaattgtccctttgcggcaccgttagtcgacaaattgaacataggaagactcaagatgaccttatattggaagaactgcagttattcttccatgacgaagtagactacgaagaagtagtttatgaaccgctcgaacgcagagtgccgatcactctaggtgcccatgaccattgttggcaaagcgttcctttgacttggaggaagagcgccaaaagcccactcgactacacaaaggaatccatcgaagccgacagggcatcagcaattaaatggcaaaagaggcgcgaagaacaagctcgactgaaaccaggttatgtggatcctgtgggagatatgtcagacattgaagtaaaaggaatgttgaaagccatggcaaagatgatcagggtagatttcgtccgttcagagtccactttcgagtggaaggacgagccactgtggaatttgcaggtcgacagacgaccattacatatagtgcatgagtgtgaatctgactttgaccccgacgaagcattgacctatcaagagctgcacgatgcgttggaagcagagctgctggctgatgaagaagaattcgagatagaagaagaagagatcgctgcaaacgacgagatgttgacacagcttagagaggaacgcttatcagagctgcgtgttggcacgaaagaaatcaacagctttttggaagacaatggtatgtctggtagtgctgctttgcaagcaggaacagatgagtggaagacggcaatggaccatgacatgcttgccgtcagaggaatcttgtcccgtatgcgaacgaagattcataaggggtcggctggtctgactgattctgagataaagttgcttgagagagatcagtcacagtatgacatagtagccaagaaaggtttacccaatgagcatgctctattcgccacaagtaggaaactagcaatggaactgatgatcaagctagctggaaaaagacccgtcctcgatatcggaggtgatcctactatgcataagtatgcgaaagagagaactcacatcatgaggccaatattagatgcacaagatgtggccaggcaactcaccaaaccaaatttcgaaaatgagttggtaactatttgcaatcacagtgtgggtgcatgcacttgtgacattaaaggacacttcccagtgttggtcgactcgatatatgacatagagcccaccgcactattcagcttcatgcatcataacgacattgattctttcgcttactgtcatagtttcagacaggtggacttttctaaagcgcatggaagtctggcagatggtaaagcagtcttcaaaaagttcggaaatgagttggtcacggctttgccaggggaatcagtctcttacgtcaacaatttccagctgactgaggcatgggtcaattgcgatgtgtttttagcgcacaacacatggcgggtgtacaatgtcatgaattgtggcactcatgtcatccggctagcggtccgaacaccatacgacattaagttctattctaatgcattggtgacgaaacgatcagagaccataaaaatcaaagtgccggtcctcgacaatcacgtcgtgagcaaacttaagtgggttgaaaaagagttggacagtcaattgctaagaacattgctggatcgaaacatgaatgcaagcctcactttgaacactttgttagaatttagccactccgtagctttaaccaaagtcagtctacacgatcggtcttatagcctactacgcttggaccatgaacagtgtctatacagttcatgggtcgtatatttgtatgcaaagcgccgcattggatggttgaacgaaatcgttcatggccaagaagacaaagattcaatgaatttcctactcagcagtctgatcaacgtgggcttaccagccttacaagacttgttgatcccacaattgccagacttgggagtgggtgatatattgaaaactttaaagcaactcattgacagatcaattttgtccacagacaatcctgaatttaaagttttgtgggacaacctagatgatctgcgaggttccaccactgtaaaaccattagacataaggttaacacaaacaagtgcgtccgtgaaatgttcttgtgacttgcggactgaaacggatggtgattatatctgcagttgctgttctcgcaacaccaatgattataagtgtgaagactgcaaagatgctcccagaccattagaagaaggcgaagtggatgtcgtgaagatggaggttttggaagcaatcaagttatccatattggcagagcttaaatccacagattacactggaccggagaaaaccgacacagagagggtgccaaagaaacaaatcatcaaaactagagaaaccaaaggccctaccgatgtgcagccggagcaaattgaagttgagaaacgtggtgtggacaagatgctcagggattatttacgagaaaagaaaacttacagttcggccctgacacatcatacccccgcaccaaagaaacatgacacgagccgcaccaaagtgttgtcagacaactcccattatcaccaatgcccaaattgtggttcctactatcatgaagagatgaaggcctgcgacagtatgttgcgaccatcagtggcagcttgtcccaagtgcaattcactgagcaccaacggattactgacagaggaggaattcgaaaatcctcccttagtaggttccactctacaggctcaagaaatcaagctcagtcacaacgaagaattacccgaagatttgatgaactacgctgaactgataggacatgattatttacaagcagtggtgcaaggtgacaaattctttgagagattattagaaattgagaccagaccaaacaataccaaagtgtggttcgcaccctcaggtgtttggaggttccaaaacaacaagcagttcaaggtgagaaaggtcaacaaagtggtcaactcagatcagttatgtggttattacgctctgagaaccgtatatgaaaagaccagcctgtcagctctgacagccacttctaggaaggatgggaattggtcatcattagacttgataacttatgcagccaaagagggcttcaatttgatcgtacacactgacaaagaagtatacgtccataccgtagattctggaacgcatggcaccatactacatagtgaaactggggaaggccactggaacaatggtgagttgattcaactggaacatttgccttgcgtgccagtgttcagccagtccgcaactctagcagaagcatcctcaatgtgccctgattttgattggggcttaaacccagcagacagattgaaagctttgactcccatgattgtgaccctttgtggagacgctttgtcagctcgagacatgacagacagactgaagttggagaacattggtggccaatggtggctgtccaataaccgacggcaaaaacatgatttgcgcaagggattcttccatctagaggtttcagaagagaggcatgagatctattccctattgaatgaagtcaccaaggcacaactcaaacaaccattgttggagactatagatattgcacatgacgattactttaacaagagcaaaattttgagcatagcagctagactgggtgtgtggcgttatattagcagtttggcaaacgcagacaaaggttgggtgaatggaaaggcagaatctagccttagtgcaaccaggatacacataaaatcccacaaacttaaaactttggacgtcatcttagtgcgcaccaaatctggcaccgttgagagggttatcttgagggcaaccagggaatacgtagttgtgaggccactccccaccgtgggacaggtaagcttgtacatacccaaatcatccattgggtccgtattgagaaggtttgttgcaattgagcaatgcaaattcagtggagacatgcgcagtttcttggaaaataattgtacggcttattacggagtatttggttgtggaaagagcacggagatggcagaggcaagcaccaaggaagatgtcagttcgcttgcgttcaccactggtgccctgaacagcttgcgaaacaaaaacacaaaagggcagatcttgagtgttgaagcggcgatgtctgcatcattgcggccagtcatccaaatagatgaagccacgggaatgactccactagacatttggttgcttgtgagcgatgacacaaaggctgtacatttttatggggacgtgggacagataggcctgcgtgacttagactggaaactgcaaggaaataggactctattacaggctatggcattgtgcaaacaacggactaccaattacaagactaaacgagtcggtggaaaactaggtaagttgttgcaaaacatcaatccaaagctagaattggcggaacacgaaacagactacaaagcgtacagcatgtctgagatggatgtcgaacaaattgacagaataattgaagaggaaaatatcacgacgctattcttcttctatgaagctgccaaaaatcattggctgaaatatacacagttgaacatcaacagcatcaccgtgtacaaagtgcatgcggaccaaggagcggaaggaaagaacgtaatggtcatccaaaaccccggaagctactccgatggtgctattcacttggacccgcaatttttgtggaccgcatccactagggcaagagagaaattagtgtgggtctctgttgctctgtacactaaggataccagtttgctgtctatactgaggtctgacgcgaatttcaacatcccgacaggcggcgcttaccaagaattcgctattattgatgagataacagagaaagtagaaaagcatagcacattgaatgatggaccagaggaaatagtagacgtgctaatgaaattgctcagtcatgctattagtacgagcttctatcaggaagcaggatgcagttacacgtacacaaaccacgtgctgagcgtaattgtgaccttcgaagatgagccagcctacttagtgaagttgaagccattagaatggttggacatgggcaagagagtggaagggctagaaatcatgaaattcaacaaaccagtcatggacatactaaatataggaaaggtgagcaaagaagactatcacgcagtctgtgcttcgatcgaaccaattttgtccggtacccagaaactcttaaaagagttggatgaactaactaacctagcaatgccacttaccgaattcttggacacaatcgggtacgtttcagaagaaacgaagcacctcaaaacgaagatgcacgaagctctggatgacttaggttacacgaagttgttcgtcaattacgatttgggcacaatttgtggtttagacaaggaaagagacttgcaccacatcaagtgggaaccaacagaattatcaataaatgatgttacggcaacgttcactagaaaatacggatcactagatcaattccaaactaattacctgacgaagggcttcgaagtgtacggagatgcagacgttgacgatcttcagcttctcagttggggcaagtgcgagatcactctccctggcatcacttattacaacctactaaccccacccgaaaagagtctccaaccaactttgtatcacatgtgcaggagtgaaactaccacagagtgggtgatgttgaggttgacaccagctaagttcgattttgaaaccattaacatcaattctgtcataatgaacaggcacaggcagatgttcaacttacggcagagtgaattgttgaccaaactggcatttgctctgcaagatttcacaggcaatcagatacccacgtcgattgtggatggtgactgtctctgggacggcttgcccagtgaccctgctagaatcattaaaaacacattgagatccaagggactcaagtttaacatgatacacgaaaaagagactagattggaagcctacttcggtgtgggtttcatgtcaatgaaagcgctgaccgtgtggtttgatgaggacaatatgcctgtcaatttcgaattgcatgcaggagccaaagctttgagtggcgcatttaacatcaacggcacagagtggctctccgacctactacagcaattcaaagttgattcagtgctaagaactatcactgaacactccactgtcattgtagacagatcggtagaagtgagggaaccaataccagttccagacctgatcataactgacgcggccaataatatgatcggcaggttgggtccatcatctggaaacatcccagcagtgttaggggataaacacgggtggttcacaccagtggagagtttggatgaactagaggccctggacacaaacgaccacaacgagccggccaaaccagtgttgccccaacgaactagccgattcgtttggccaccacctcccacgaccccaagtaaagcttctgtaaattatcagacggcaaggccccttgaagattacgacacaagtttgcaggacgtggtcatgggtgaagcgctcacacaacctaaagtagttctgtaccctgtcgaactggaagaatctatggacgagcagtcaagactagaaacacaagaagggaggttgcaaaagagggcacaggctttaattgaagccctagaagaagtagtgactggtcaagtgccaactgaacctagagtgatactcaatcctgtggatacggaaggaccaacactcgtgcctgaacatgaccaaacagtgtattcacatcgagcatttattgaacaagtgttagaattcatcaaatggttacgtgacacggggttgtacacagaagaaacacagacgacagaggcagcacaacaacaacaacggactgcgcgtccagcaccaactgcacgagagtatctcgatgctcacagcaggacagtgacactgttgagccaaactcctattctcaatgccactttcaggatagtggtgagacgtctaaggcagctaggtcgtagtgttgctgaaatggtcaacgtagggattactcacacccaaactcaaggagcgtcagaatctttcttggcatcagctagctttgtcatgataacggaattgataactaatcacattttgactagctggcaagaggcagcgacgaatgctccgactgtatactacttcgacgctaagggcaaagtcaagcgcactacgggcagagctgatcctgaaccagcgcccgatcacatcgagctgctgcaacaaatgcatgaacgacaactagtcttggtacacccacaaatgttctttgtcctagaatctaaggggaagaataattggatcagtaaactcctgaaaaccaacccatgggtcgggaaaaactacaagattgagaaagtggaaggagatcgtacgatcatacaatttgcacctgactggaagacaaaaactttgattagatccgtagctatgatggcacaaatgacacaagtgtgtggaattctgggcttaaccgtcaaatacaaagacagcacattccatctgacgaccaaccaaggatgcaacatgttcgctaacctagaggttgaaacagactcaggtccagtggtgacattgagtagcatgtacggaaaaattatatgtcgtaaggccacgatctatcatgaacatgaagatctagtgaatgcatgtgagatgttgggcatacagatacccttcaagcacatacacactcacaacccaatgactgggcagtggtatgacaaccgcccatcacacctgatggtgcatggcattgatttgtacaatggcctgaacaattgggccgttctgtccgacagactgaacgctttgtatacttcgtggggactgattttatatgccgctatggtacgtgataatcgtttggccaccatgttggccgagcgcaacgatagatttactacgatgacctttgccagggaaagaaatcgtgaaagattcaggaaaatagaggatttcgctactgtatacaatttggcagtttctgctggtgacaagtatgcattcgggttccaagacctcagcaattcatggttcttttacagatcactcgacgaagccactaaccacagggacgtgaacacgaagctcggcacagcattgatccatgatcacatcgtctacatcttggatggtagttacattccggtggcgccatacagtgattggcatctagtcgttttggacttggacgcgtttgtcaagaagacatacgaccttgaaatagaacggattggagccctaactcctaaaatagttacagatttgttcaaatgggcgtactctggtcgaggaaacccgtttgacaatttgatcattccgttcgacaaacacaggaccaaccaaactacagtattcaaacacatacaaaagtacgcaaacaaactgaacattgctacggtgaaagctagatcgaaagtgctctacgtgacccagaacacaaccaagtatttgatgagagacaagtacattctggaagcagcaaacctgcaggaacaagtggacagtactatgggaggcgatgcgctggacgcaatcgacagcatgctattccatctagcagatacagtgttccgttctcaatacaccatcgtgtcttcaagcatgggcgctatagcagttacatcaaaattgaactacccaataatccacggcctcagcaaccactccattgaccgttggggcaaaacatctagagttgccatcccgtacctaacctccttgtgtgtgacgttgtcggagagttctaatgaaaacgcaaggatcgttggccagtggttagacactgagttgaaaaagtcgtatccagcttggcagatgaacaccaatgtaatgtcaactttcaatgtgatatccgccagccaatgcggagtgtctattcccaccctcattgacagaatgcccaacaacagcatgtgcataatcgcattcccgaagttaggcgatcacctcacacattccaccatgagacaaggtagcgaagtggttgtaaattacaatgatgttgacttgcaaatctctgttcatcccgataacataaagatgatgaacgaattgcaattagaaggcactcaactaaagatcgtgtcagacatgatggggcactatttcatagaggtggtgaagacggacaagccgacacggctcaacaaatacttgagcgatccagaagtccattctgctaggcttgtgcactatacgttaccaaaattagacacgaccatggtcaagtggctagagggtaagccaatgagtctttgtgacgtttatgtccccgagaacgtcgacaatttgttatgtttgagagctcaaagaccagggtgcacttgggaagatcaaaaacaatacgccagaaccctaaggcaaacgaccatatacaatacaagaagaacagcgaacctgtacaaatccacttcggatgaaatgttaatctgggcggctgttacatacttgcatgtacaacacaccgtaaacccaatatacaacattagccaaacgaagttcgctgatgaacacagaaaaatgggcctatcaagtatcctgtatcacaggttaaaagacataatgggtgctgtgactatggaagtgacctcaagactaggactaaacaagagttggttagacttggccatgcaactaaacgacctaatcgaagacgtctccggcaataacaaaataggtgatatactactattggccaagaagtatcaagtgagaagagtagtgcatttgagggatataactaggtcagaagatcaaacctcttggtacaccaacggattcaaagggcagttaagagcccccaaaaccaatcgcccaagtaaattgcctgaagaaaccaatcaaacactgctaccaaatgtcgccatcaaacagacggtgtttagtgaagtagtggtcatttcaggttcaggagtgttcaaacagaccctagtggacatagccaactctttggagttaccaactgtggaatgtgactctcacttcagttctagtaggcggatcagagctcaagacgtggcggttctactcaaaaacatatcggacaggaaaaggacgctagcagcatatgacgtgatatgctgcgctgactcagattgggcaacaatagcagcagcaattcttaccaaaaagaaattgcacgtgctgtatactatggaaccatccttgattgctaagaggatgcttgatgatatcacatattacactagtccattcgaagatgaacacataaacggcaacacagagcgaattttgaacagcttgcgcaactggatacctagcctcgattttgaaacctggccgataaagaagaccatgttcatagaaagctccttggcacatctgattaacgatgaaactgtgacagaaaacatgaggacatatgagtccagcataaccaccggggctggacacggatctactctcactcatgacaacgccatgacctactccgaatcaatcaaattggacttgtgggacctggaaagttggattagtgggttagagaattccagctgtcatattacttctaacctgatcagtctagggatttgtttgaaaaatggtataccttgttatgtcagtggaccaatacatcaattgccctcatgtttcacactgccagacactgactctaagcgttatgagcagcgtcatttgagttcaatgcggcaattaaatgacagaccgagtaaaacgcatattgagactgtaatagaagctacgttgagtagagtggaccggctgcacagtggggtccagattagttcagcaaccatgcccaatttaatgccaattagaatgagcattccagaacgtgaggatgacacacactcattgggttacgataagactgcagggcgtctcatgtctgtgaccgcagccatagtttgtttgacagaaggaccagtattgttcaacaacagttggctagacgtagatgaaatcataagtttagtcgaagctcaacgcttcaacgcacttgtaactttagtggtgaacgaaagcggacatgtgttggtaatgtacaaaaggcaagggtctatgagttggacaatcaaagaagtggtagagcaattgaactctagtgccgaagcggatgaattctcatggttaaccaagtttaagccaggcatgtacacaaccacgcacctgccagttttagatttacgttactctggagaagttaggttcaaagacccacttgaacacttgtattctaacaacaatcaggaaggacaaacacctcagagagtgagaaccatcacaaacgtcatgtccacggcgaacattttgggatcagtgggtggtccaggaagtgcagtcacaaaggagacgacggcactaacaacagcactagagtcgccagaagtactgtttaatacaaaagcacacgacggttctgaatccgaggaaactgttgaatcagagaggactgcccatgataccacagagccaccggagagtgcccctgtcgcgcaagagcagccacctgtagtgagtcagcaggtcccattgactgaacaaaccactgatgaggcagaaaacctcttgcttgaacaattgtttgacaatttagaaaacgaagtcggtgcattagtcgcaactttttcgagcttcgacctggctgacatggaatcaatgaaattcgacaatggagagataattaagcatactaaccactattcacccagtgatggcatgtgttggaagaaagctgtgtcatttttgggtattgaattgccaggcaatgaagatggaatgagcccagaaaacttgatgagtttactgacacgtgcggagaagacctttgcagttaaagaaggcaatgtgttgcacattttccacgatagtacaatcccactaacaagccaagaatacaagtgcataagtctggaattagccgacgtggctggactgcactggcaggtcggagtctcagtgttcagggtggtagatgctgaccaacggataggaagtgggaaagtcatcatagacgtgaactgctccaaagctggaaaagggtatgaattgaaaggtcgaacagaaggaccatgtgttgaccacacgcatgcaccattattggacaatttaacctccttactaaataatcagtttgtgaaaaccagtctattctcaaaatcacacatggagttcaatagcctaatgaccaagcacagcaccctcaaattcagattcgagacacaaaccaacccagtgatgttcatgaacatggaagctaggtacgatgggttggtctccaacacaacagggttcaagaacctgcgaggtgtattagtagtaactcacaatggagtgttcaaaggtgtcgcattaaaccaagattcaaaacaagtcattttcattgctcatgatgttaaaagtggagcacaaatggggatcaacaacagtagccggagcaacacccggatgataatagatgtgagggcaccgattggcacgtacgccaaaagaagcaaaattaacatcacagcagaggtgatgggagttgccgacttgactttacctctgaacaaacaaacggcaatatttttgaaaatgccagctgggagtcgtattaagcagatcggggacaaagcaaatctgattgtggcgcattatgacaactaccaacatcacaagttagaggggcgtagagacgagagggaaatcattgaagacacactcgagagaggctattcagttgaatgccagcccgcatggatgtggccgttgatagtgaagcaggccacagaatacgtgaggccccaaatcaagtcaggcagaccgataataacatttagctgtaaacatattctggccaacacatacgccagggctagaaaccttgactgggatgaaagtgatagtttaattaattcggtgagcatcagccgagagatcgtggaagacagcgttgaacagatctcgcatcaagttgacgtttcaagactgttgatgcacttatcagatggagccgaagtgctgccggtcacaaaccattattatggtgaagaagttgttggtcacccagaacgaccatatcgtggcacatacacgataagcgaaccaacagaattcaccaaccctgcagacgtaatcaatggggatcatgttttgatgtccgatttggaaccctatttggaggtcctcaacgtcaaatattcaaccgaattcgaactgacgaaattaggtctatacgccaattgttcagaatccaccatggagtacattctaagcagctctataggatatcaaaccgatgagtccagtgagtatgacattttcataccaatctttgatgagtacgatgacaagggtgtctacagtttcttattgcaggtctcggcctcttggttcttctcaacacacaaatatggagaggtcatgacaggaagggatttggaaatgtatttgtgccatcatgactcttacttcaaccggaggacgaggtatggtcaagacaaaattttacgtcaagcagaattgtacagcattcacagcaccctaaacatccgagttcctgatgcgttagagttctatcaacctggagaggactttgaattttcaaacggatccatgggttactatgtcaaaagatatggtgaacaaggaggcagagcagaaggggaaaatgttgtagagttacaagaggaagaccgggacatgtggtttttggatcgcgggaacgctgacttgagtattagacaggttgggcacctggcgcccagagctatcgtagctttagccagcggaggcgggaagaccacgctggtgaagttgtttcctcttttattccatgatcctgatgcatcagtgatcttacaactcattgctgagccggaagaaatgactatggacgattggcgattacgaaacgaacaagtcaggagacaactgtatgcggatcgagcaaacatagctggaaaagtattgatggtgtggcacccagaaaacgttccggaaatgtggtcgcatgtgaaaatggtcattataacgattgatgacaagagtgggctacgcatgtttgacttgaataaccaatcgttgttagattactgtaaacaatatccacgcacggaacactggcacatccaacgctctgaagtgccagataaattaatcgacaggttttacccagaatacaagtccagggacgcttccatccaggcgattaatgttttcaacgctctatgtttggaagacgtgacctatcagagcaacgtcatttcagacaaaccgcttactaaactgttcctaccatacgtagcagccactgctacgagcgtggaggttgcagaaggagttctgggggaaccagaacaagcaaacattcaatcaatggatttcttcaccacgacagacaagacagactggctggaggtaagattgccacaaacagacatgaggataaaatccaaagaagtttttggttcatatggcgtcgaaaagaaaacaatattgaccaaatacccagtgtggagtagacctgtgttcaccaaagtgcaatttgccgtcttgaattccatcacgaccagatttggacaagtgcaggtactacgaaaaagacagatagattgtctgcaccacatagaaaaaatgaagagagcttattttgtgccaacatgtgagcaattgatttctaagttcaagaagcggccattaaaaattgacgccaaggagacacaaaaatggcttgcaaaacgacctgacaggaacaaggtgactaacgaccttttggaaattttagaagaaggagttggtgttcacagagtcaatgcgattaagattcatgcaaaactagagtccttgttgaaagaagaccctataactatgccagaagagcaaaaagtgaggttgatagcatggcaaaggtatggtctggcggctatttacagcccagtgttcttggaagctaaaaagagattaaaacagttgctgaaagatacagtcatttacgcagatggctacaccgcaaatgaattgtcagccaggttgcgccaggtgtcaggcaccactcgattctttgaatcagatttagccaagcaagacaggcaaaccgacaatgaaatgttggatctagagttccatgtttatgacatgttaggtgtttcaaatgaagtactaagctcctggagggcggtgcacaggaactggcgctggaagtcagatttacacagtggttatagagatgcgatgcgcctgactggtcaggccaccacggccctaggcaatctaatagtcaatatggccgttcacactgacattgtgctagaaaacatgtcaaaaatattcctgattttgatgttgggagatgacaatatgtttttgacgtcagctttcttagatttgattgggtttaaaagggacacagaagagctgtttaacatggaagtcacaccagacagccacacgacacacggcacttttattcaactcattgcatacaaaactcctgagggaacttgtgagatggcaccagactgggtcaggttggccagacggtacgaggtcactaatggagcatcggaatcgacgccggataatttgcacgcaagagcgatgtcatactgcatgatgttaggagctattccagaggtcaacgctttagtggcgaggaaaaactggccaataaaaccatttcaatggtacgagccaggccaagcgaaaatagccatggctgcaaaacacaacacaaccacagcagaaattgagattaggttgaaacacttgatcaacatgatggaactggatgcaggccacgaagtagcttgggaaattcccttgccactaacttcaaaacttgccgccaggcaagacaaaaagattaactaa

SEQ ID NO: 1245 - DNA, 15234 bp, Rhizoctonia solani endornavirus 6
  source 1..15234: mol_type = other DNA
atgacatcaacgattattatgggggaaagaaataaatgcagtggcgcagctgcatgtccattattggacaaacaaactgcgcacttacgtaacagcgaaacaaagagtggttgctttaaaccattcaccgcctctgttacgattaatgggacaacggagttatctgttgtttccaacggcggaataacacacagccaattttcattgttcacctcgatggaacaagagtctttcgcatttgactttgagacagatatgggactcgttaaattatttagtgacgttaactggactgatatgggtgtgatattcatcggaactaaaatgatttttgactgggggttgatcatgtacagatatcaagacaacaaacagttaacaaaaaaggaattgctcgtacgcttgacatctgatgcaggcggtaagtcgctaagggaagcaactctattgcacatgcaaaattcccttgaattgctcaatgcatccacccaggcgacgaaatgcgtagagcttccaacagttagtaagccatgtgtggcacaaactgactcttacgtcaacaaccatgtctccgtttcaacgggcaaagtctacggattaattaattccctacctatgaaatttaggatgaagaaaaagatgtccaagagatacttcttgtacaagtatcgtgccatgcaacaagtcaaacctactccaaagaccgacgacgttgaagtggaagatcaaattggagtatcagccacaactgacacaaacgttacaatcattgacccaatcacaaccgtcaattacgagatcctatggcgacaacctgtcattaatgagcacctcgtcggcaccaaggacaattgcttggttaaacataacaatatcatcaagattactgtcgaagctgacccagatgacatcgttgtaggtggaatgggcgattgctggactagaattccagtgtttaaattagtcatccccgatgctgaagaagaaggtgcttggactggaacggtagaggagcatgttgctctcagggaaatgcacaagaaaaagaagtctttgccaagtgaatatgctatggacattgacgtgcgggactatcctggcatggaagaaatggaagatgaggacttcgaagacgactcagatttcgatgacgaatgggatgacagcgacgacgacgaatctgaagtccatttcgaggaaggtgacatggtaagattccagacggatgacatgttcttcgactatcctgcgaacgagccaatgaatgcttacaccctaattgaaatcctagaatggatgtatgaagaagaagaccgacattcttcactatatctcaagacgccgaactggcgattcatagtttggaatgggatgatacatttggaaaacaatatgttctcatcaagttacaagtacactatcaatgagaaccaccctcaaaaattcacatcattgcagggcgctttagagcagcttaaagatttggtcgctgaaaatgaaacaaccactatatcactcaaagtcggtgctccaaacatcagaggtatgctcagcaggactgacaatgaagttatcgacgcgctcggtgacatgtatagcaacaaatacgttgatattgtagacaaccatgatttaagagtcgtgagaaggttctacgcagctcaccaaaagagtatcctgttaacagtccaaccgtcaaaaacggtgaaagaccactttagcgggttaacaaacataactatattgacacgcaacgacctcacgattgatgctgatttcacattctgtcgtgaattagcaatgttcgttgcatacaccatggtggacccgatggacttctcgtcagacgacacggtgaccaaattcctacaaacccaacctgaagctaaattgccttctgttgacgccaagactcacatatgtactgaattgacctccaacatgctcgattcgcatgacatagtgtacgttattgctccaactctgctaggaacctcatacggtgagttgaaactggaagtcggaaattacatcacacacggaaatctcgtcgaatacttcccaaagaactcaacgctcacacacacaattaccggcataaacccaattttacaaggtggacgcgttgcgaatgtaaatgggcttaaagtttattgcttggcaacgcatatggttggcccattttgtatatacgctttaacaacaatagaacacattaacatctatccggagcaaaacaagaccaggaaattcgaagtacctatcttcgactcgtggctattcagcgaagtaggcgttgacaatcttaagttcgagatgaccgaagtcaatcaagaattgttgaacagactattaaacaggaacattaccaacacagtttccgatgaaaagatggtagagtacataatggcgcttagttggtacagctataacaagcgcggagtggagatagccaatgtcaaagtgacgcctgaaatggctaaaacacacttgtacctagctaaaggactgttgatgcgtgaagaactttctgagcaattaacccaagcagcactcaccaaaggtagcatttcaagaatagcaatcgcaacattatcagctatgctccgcgtcaaatcgtttactctgggggaaactaccacgaacatcattcaatgggtagaatcactgttcaacacaacacaagttcttgacagcgctaacaaagctgtacaattctgggacacactagacatatggaggtcctcgtcaactgaattggtgcacggaaatcctagcatcactggctgcagtcaccacgcgagttgtgaattgactgaaaccggacatgcatgcttgcattgcggctttgaaaccgctgataaacagactttgtattgcgaatgttgctacgacacggaacacgactgcaagcacgactgcgacgtagtgcatgtgggaaggaatgtgtgcaagtgctgcaaaaagaatacagaaaacgaaccaagtgtcacaacgaaaacagtgtactgtgactgttgcctactcaaacatacagaaacagtgtctgaagagcagtcgaagcgcgagagtgacgaacccaaaacaagaccatccaaaccagttcgccacgaggaatcgggaccgggagagcacaaagagtcaatggctaagccggccgtccaaccaggaatttccaaaccatataagaaaggacacacacacacctgcgaaaaatgtcgcgcaagtttcgcctgcgagtgctctaacgcccttgaaaacgacgtaaggcaaagaccaaaggacagttgtccaatgtgcgaaggcaacaaaacaaacaagttactgtattctacaatactgcaaactggtgagacagtcttccagcctctgaccacccaacaatatttgactagacttacaccaaacgcagttgtaacactgacgaatccagaattggctttggaaactcataacgtcgactttacaacaaggagaacaagcggcataccattcttgactaaagacatgtactcaaattctgaattcgagtttacgaatattaaaactgctggaccagcagattgcgggtttgaggctgtgcaacactacttaactactatggttacggagacacacatatttaactcaatcaaaaagattgagaacttcacagctgacgatataaagaaattattccgtgaaaatagaatgaatctactcctcgtcacttcaactacggaagtggtcaggtgcaaacagaacgatgaatttgccgttataatgcacgcaatggctaatggggagaacatcaatcattggtatgtcgcggatgccaagcacgccagtaaggtcgtgccatatggatcaattcacaacactcgctcagagcacgaaaaacaagccaaacgtatcttcagcaaatcttattctgaattaacaagggaacaacaacttaacttgtcttaccatttagcttccgcaactgagatagtctttaaaggatcattgccgttcgttaaactagtaggggacactatgtcaaactgtgaccaaccaacgaggtatggtgacattaaagttaaagtccataacaaactaattgacctggttgaattaatgctacaagcgaaaaagactgggaagattgacgacaggctgagcgaacctctaataactgacagcaccacgccgatcgaagagaaactgttgggcgaagccagggcagcactctacgacatagccataatgtggaccaaaccgcaacagaattgcagagtaaaaatcgtcagcactactttctatggtgggaccaattgcatgtatctacctggaattaaacgcggagacatgatttcatataactataaaggtgttattacttcaaacatagttgaaccgacccgcgagggaatggtcgcagtagatcgccagacagcaaacgacgttaccgtctaccttccaaaagcaagtttatcctccttgctcatgaagtttgccaccatcaataaagcattagttggtgacaaccatgacaaaaatgccaacgcgaggtttatacattactcaggccctggaggtgcaggtaagacaacagcagttgtagagaaaatggttgaagcggtaaacgatgatccagaaaccaagatagtcgcaacagctatgtcgcgagaagcaactgacactttgcgtacacgactcttcgccgtaattccgcaatacaacttgacagtggaaacattcgagagaatcagttcatttgacaatcttaagtgtgattatttgataattgatgaagctacgatgatacacgactggcagttccatgcgatgccagtgaccgcgaaaaatgtcattctaatcggtgatactggacaaattggagccgaagacttcagcttgataccgggtaggaggccagtaatatcagtcatggatagatatgaggatattggcgaacgcgtggaatcttgggaagtcaagcgatacggcaatccgctagctgaggaactaagccgccatccggccctacgcaaactacaaggcaacaaggatatgaagaccgctgttaatctatactggaatacaaacctagtgggtagtcaaatactagaagcctttgcgcattgcgatgttgtaatagtattttacaatgatcatgtcgatttaatcaagaaagctctatccaatagcaatattgttgtaacgactgcggccaagtaccaaagcaaagaagcagatcacgtgggtgtcctacaatcaccaataatccgcaatcaagtgccacaagacggtgatatgcatttaaacttccaatacacttatagtgccgcgacgcgtgctaggaaatcactttcatggttatctgtggcatgccacaacactggagtaccactggccactagacttggtattcgtgttgggtccttctacaacctactcgggaagacgacaataagtgacgttaagtgggattggaatatgcaatacgaaacagtagagcaagaagaagtcgacctaccgcccatgttacctgacagacagaaagtcgtcgaaaaactggttggtgccataacgctggtacacaacggaatagaaacagtaacaatgaacgcacacgataggatctgcagagcgcttggactagatatcagcggtaagacactgccaaatgcggcgacgatcgctcgaatcaaagccaactctacccaaccgccaagaattttctttgcgctcgacaatagcccatggataacacctgacccttacactggtgcacgtgactggatggatcacataggtgttgtatacgagtatgagtaccatggagtatacgtcaaattattttataactacaattattacggatacagctgtaaaatctggaccgtggaaaatccgactatcgtgcctgagtactgtatgatcgacagcgcgcttgatccattgctacttgcaaacagaatcaggcactatgaaacaactggtaaatacatgtcaaacccacccatttccacagtatcgtgttgggctatagtgacagacgttttcgaactaggtggaactaccagaagcttaacatattgccagaggaccaaagcaattgtgccctacacactcagatacatttatcccaagaacaacgagactcttgagcgatattcaaataatctcaaactcaatgcaactaagatctgcaacatgtataacacaaatgcagtctcgtacagcgacatatcgagacaggtcgttagagcatgtgcattagcatgtggatttaaagaaatgtctcagtcttctgaaggtacaacgtacgaggtgcaggcgaaacatcctaaattcgcacaggttggggtgcgggttgttaacaacgtaatgcaagtaaataatccaaatgctccgatctgtcagatgcttgctctatgtgtgatgaactctaattatgtgctcaaaataatgggtaacatacacaaaccaaggatgcccgtcatttcaaatacgaacttacaactcgaacgtgcgcgcgcgctagctgctctcaatgacctaactttgcccgttgatgcagtcgatgacataagccggctcgattaccaagcgttcgtgacagatttcttagaggtcgggcgtgagcggaactcaacactcaacattgaaatgaccaaagcaggggagaattattcattcaaaatgtcagcaacggtgggcttcataacggggtcacggaccgtagttatgaaacccgacctcacagtattcagcacagagctgggtagaacacgcacagcacagttcagacgatcactgcatgcatactcttacggaccgccgggtagtttcgagaccggaaacattaaaatgaaattatcaaaatttgctacaaacaggatcagagtgttggcgtacatagtcaaagtcttccacgcaaacaatgaagagttccagcccagagtcggcacttattggctcgacatcaaaacgagctacactggatgcgctgcttgcactgccttatactttacactagatggacacaaaacgacagtcactgcggactacgactttaggccacgatacgtatttggcccgcacgctgacattattaaggaattactcgaagaacctggcaaatgtaggttatacccgcctgagtttgaggacaagaattttgggttggccattctaaccgaacgggtgtatggctggtggaagcagatgttcactaaactatcgtacatgcagtacatgcgtgacaacaaatacaacaacatcatcactatcaacaggattagggaaacgttggggaaaaacgtggctaacgtagaatatgatgacatgaccaattatcccttctggaaccaacgatgcacccaattgtctgtaataattgacggcaaacgcgaaattattgacaatcctggactacacactaggcaacatttcacaaaaatggattacattcttgagtcgctcgcaaatttgaacaaagcccagcatggtaacaagatcagcagaataatatcgatggtgtacgtgagcaatattggggctctcgagcgaattgccggaatgcaagaatctatagcatggcacaaggcgaacaagactgccacagccaacacactcgcttctaagtcaacgaaacaactagttaaagcactcaaatatgaggaggaagtccatcccgtcccacataaagtatatgaatacgccaaagagaagtacggctatcaatcactaatgtcaaacaacgctgaaaccattgccgactacgcacaacaagcaaccgatgtcgtgatgtgtgctgggttggttggacgcaactcaatgaaagtggcttattacggaaactgtccgtacataacgttattgatgccaagcgtaagtatggttgagaaatacaaccaaaactacgatatactgcaaacaaaactacagattccaacgatgcttaaaatgtgtgaaactttccttagtcatttgccggccgatgacgagagatattcatttgtaagcaacctaaagaccaaatacagcgttaaaatctcagacgcagacgtagcatattgttccccagccatactcaaaggatcaaactatgaaatccttgacagacttaaagaactaatggcaaaccattctaaggtctacatcttcttaggtaggaaggtagatgagaacgcagacaactgctactacagagtcgatgaaagcaataacattctagcaacaggtaaatggattgagcattgtatacacaatggtaataacatcatgccagggtttaaattacatattgccaacatgttgccaacaggaaacttgctgaccatcagtagcaacaactgggtagacaaaccaatgatcggaaaatcgttccaaatcgtcaaattgcctttgctttttactaatccatccaaaataatcaacaaatcgacgctatttgactttgttgagtatgcagtagatgttgcgttctacaacaacatggaacgtcgagcaatcaacaacgcaacactcaaagatctcaaagtccaagctcgcacaatggtaaatgtaggccagtttactactgcaaacgtagcatcgaagtacaaagtgaacgttgcaacggccgcacaaacggccctatttgcttacattgctgcacagaaccttaataggaaatacgcactcacagggatgcttgaccaagaaagaccagtgagtagtttgttcaagttagcaggacttaaggcgatcactgacatgctaggcgacagtggtgaccaactcaattacgacaatttactagagttaatgacgaactatctgcctatcaatgacgtatacaacgtcatcattcagactgtcgagaatctcaaagcactgtcgatcaatccaaaggccaattacagatgcatcaaaacaactcaaggacaagtaacagtaccaaaaatgaaaccaacgagcgataagtacgattgcaataatgttgtgacttatgaccaaaagtgctccacttgtgtcgaccgaccagagttaactgatactatcaaatccatcggtttggaatacatggacgatccacgagccgttctagttaaatctgccaggtgtgaacacaaaggaattgctatagttgactctgataacaaagatgctcttactcataaagagcagttattcgtagcacacccaacactcgacttagccggacatgcgttcgcacatataactgcaaacaaagccggttactatgacgaaaactttgaatgggcagaactcagagctcagaacattcacttgccatactatgaatcatgtgtttataacgaatgtaggcttgattttacagcactagacactctcaacgtacgtgtcgggactataatatacaatagttcagactgtataatcactatatcgttaaaggcttatcaaaacaacggagaatacatacgattcggaaataacaacgtcgtcatggtggctgacccaagtggcgaggagaaaataatccggacaggcagacgcagcaaccaaagcaacatcaaagtaagtcttgtaactaacgtgagtcaaaagatcagtttctttagcatgtcagacatgtgctacatcatggaagacgctgaagaagtcgtcagaggagttgcacaacaatgccatcatacatggaatgaattgcagagcgttgaattcacaaagttaagttctggtgaatacaaatcgagatataacaacaccttctggaagttgttagtagggcacaacagatggggcgtcaacattaacccgctacacggaaatatgcacttgttgtcgaacacagtcaaagaacctggagcacttaacattgatgagttgaaattcatacaccaactgcaacacactttacaagttggcctagacaatcttcttgtcgaccattcaggaagacgcatcaagtctttccagaataaattcgtgcacatatacgcactggacaaaaacatcgaccgaactgtaatgcatgcaactgacgataccgatgtgacgttaattatttgcaacgatggataccaagccaagaaaacacctgtccacgtcaatctaatcagagtgcctgcggacgcagtaggcaggtacaacgcagcaatgagattaatcgtcggattattagctaaggcagcttacacgcaattccacgaaggccaaccgcacatcgtgagttatttctatgaaatgttcgcgtacaagctagccaagaagaccaagtcaggtgtaagtttatcatgggcaaggaatttcggatgtcctataggacacacagtctggagagggatgccaacaggagaaaactggtacaagataatgagaacaagtgttgcctatggtggtaagtacggcagtgacgaaatccattacgcaatctggccagtcgacacttggtacgtgtcaccgtatagctatctcaagtcctatagcattggatctatcattgatgcaggtcgtaacttgacgaaagtggcaattccagacaatctcactgcgtacggaataacttacgaggaatactcaaaattcgacaacaaatacggtatggaagcgatgccgactatgtatcgcaatttcgacaagcgatggaatagtaaacagggtgggagattagttgacactacaacaccaccactgaactacttccgcaacactataagcgctggttcagaaaggttcttctgcgactcggatataacaattaattgcaacgatatcgacatggatgaatcttcaaccgtaagcatctacttcacagacgagaatggaacgagtgacagcggaagtgacggctcatctgaacccgaggacagcaacagtgaaactgagtatgagtccgtagttgaaagtgacaatgatggagcatcggaccgaattgtctctgacaaggctccgtcgttagtagacagcgatgcggaggtagaaacaatcgttgcaagtgatggttacgaaacaatgtctgaaggcaaaggtaggacttcaaaaggtgttgttagcaatgacaacgcgatcgctaaagcaactgaacacaaattattgacaggcgagggtaagtactgcggcattgatgcttgcccggcagaattgcgcaaagaacttaatgcaacgatcatctcacaaaacacagcacaacaggtatatgaagggtggttcgatgatgaacaacttaagcgagccttcagcactatgggatatgactatgcgtcgattaaaaagaaccgtgaagatgcacgaccaaccaccgcggccgaagtattacgcggtaacagaccaactgtgatataccacaatgatgcaggcgtgcactggtatgatggttatattttaaccgcgctcactattaaagagcagacagccaatagaattgcaagcaagcttgaattaaccgtcgcagaagttacagagcaagtgaagatacaagatgatggaacagtcgaaactctccaactaccaaatggatcagagtacacatatgagtggaacacaaccaccaagcacgtaatagacatgacccggcagacactagcttacatggaaacaatcaatccattaagtgatgaaatgagcgagtatttgtcgacactcataggtagaaaagtatcattcgtcacaccaacgaaaaacaatgtaaacgaatctaacacgttcaaagactatatggtacatatagtggcggaagggagttctccaattagggaccaagttaaacgaaacgttggcttagaatttgcaccattattattagaaaaccagctgcatacagtcgtgcaatatgaaaccttgacgggtgaccccaaaaaccctcagagacatccgctgaatgaaatagtacaatcggaaaaatacaatcctgaaactgatggacaatgcactcaaatgtgcatcgaatattgctatatgttcatgtcggcagaagcggatgagtcagtactcggtggaatcagctacaacatgggtgactgggcaacgacagacaggacagtaaaaacagcatacttaatcaacatgaactgcataataatggactcgggccttaaagaagcacacattcacatcattaacgaaggtccgattgccatattaggatataagtattatgagggtagtaaaaacggacattgcatcgtgcacagcatagtgcaggaccatgcagatcttaacctaggtagattcactacaactagacatggatatacatttgcgccacaaacgctcaagtttagactcgatgaaatgacacccggtaagatggttgattacttaactgaaactgaacgtgacatcaagcgtggggacatacctgaattaaatgactggcacatgcgatggaccggcaggatggatatagtggcaaataaaaagaaaaacgcagtagccactgagtatcaaaaatgcggggaccttatgtgtgtcaatttgcgccccgaaggaggatacgtatacaggacgggaaatagtagtagtacagcaaagaacaagggtatggaactcatggtgacgtgtacaggcgaagacggtaaaacatatgcattgtcaaaacactgcaccgagtacgttcttgacgtcaatatgttgcccacattcacccctcgtagacaacaagccgtcatcaaacaagagaatggtctattaaatatcgaatccaaacagatagcactgagaaactacaatgaatatggagcattaccggtgaacagagaagcaaagaatttggttatcttgcaatacgatggagtgagtcatcacttccgtgcagatcgtgaagcaatattagcagccatgactgacgacaagagacaaataataatcccggtgattaagaatgcggcagcgttcgagtggatagtgcaatccggaggaccatttgtgccaatcgttatgggtagagatgctagtctgggatggggcggtgttcaagatttcattaaatcctgtttgcaaatatgcattgacacgatatccgacgtaaacacgaactattacaatgcggctgcagttaataaagtcatccaatggcaactattaggcaacaggtggggacccacaaagaaacaaatgatggtgaacgaaaaaggaaaactcgaagagcgcgacttatctcaaaccaaagacaaggattatgagaatgaactcgtaacaagcgtgtggaaaatcactcaaacgttactgaacaaatatgaagtagcggacaaagataatgaagatgacaaggttacaatcagatacaagaaaatgctacaagattggaagtaccagatgaacgtatcagtcaaagtgatcaagcaaagtgacgatttacaaccagcaagattcagtttcgacaagagagataaagacctgatgcggaagacaggcatactgttggacctgactaacagttacataattgatttacacagcaataccgtattcagatataccaatataggtcgcggcacatttgaagaagctgtaaaagaggttatcctagaaaacgatgtgatcaacaccacgaatgaactctataaaggccagtttgacaagacatttggcaaggtattacccgtaatcgcggaaaaggcctatgaattcactgacgaccaaaaacaaaccgcaatgacaatcgacgttttgaacgactcatacgtaacagattggaaagtgtaccctgagataataagcaacaaccatggaggtaatgacatttataccggcaatggacaattcgattgtccaatcaatgtggagatccttgaacacgatcgcagccccaagattatcaatttctacgaggacaacacagcaatggtcgataactcaattgaactaccaaatcaggacataggactgcgcggcggtgaactaatgactggtctcacagttgcaaagaaagggttagcagtggaatatccgactcacgcacaaccaaattatatacaaagagcaggcgcaggcgttgctgccatatctaagctgtactccaacaaagtcagtctgaggcaggttcaacatgatcctaaaggtgacgcagacgatttcatatcagtgtacgcacaagaaggctccataacagcaatcccgcaggtcaacatagacgcagcagcgacactagaatggttaaaagaaagacctggaaccagcaaagtcgtagctgactttatagaggtaattgagaatggtctagacatcgtaggaatggataaagttaacgtacacaccaaacttgagtcaagactgaaagacgtaatgatggaagcaatagatgaaataggaatgccagagattatagatgagcaaagaatacgcttgattgtttggcagcgtaaaggaataacagcagtttttgcaccgtttttccagcaattaaaagagaatttaaaaaggtgtctcaagcacaacattgtatacgctgacggactaactccgatgcaaataagcgagctagttaagaaactcgacattaacgatgccaggtttgtggaagacgacctcgaaaaacaagacagacaaactgacatgacgctaattaaaacagagatggaagtttacaaacggctaggtggcaatccaggcgtaattgatatgtgggagacagtacatcacaactggcgcgctaagggtttgggttataagttcgatggtgatgcatgcagacacaccggacaagcgacgacagccctgggcaatgccatagtcaacttactagttaagaagcggattgtgcgtgaaatgggcaataacttactactcatgttagtactaggtgatgacaatctaatcataacaaaatatccgttaactgcacaacaagtgtcccaacagtcagcaagacactttaacatggcttcaaaagccgaggtgagtatggtgcagggaactttcctgagaatgatctgctacaaagacgaaaaacttggcaatttcggtctgggacccgacattgtgaggctgcgtagaaaatacgaagtactcaatggcgtgtctgaaatcaatgaccaaaacatcataatgcgtgctatctcatactgttgcatgatcgggttaacaccagagacacacgcattcacgcaaaagtcgggcttcaatgtgaaattacattcgtggtattcatggagcgccttaagacacgcaacagcaaccaaatataaaaccactgaagcaatgatagacaacgaatacagtctacttatgaagaccttggtggagaacaaaatatttattaatgaacaactcatgttcacttcaaaaatgagctaa

SEQ ID NO: 1246 - DNA, 14274 bp, Rhizoctonia solani endornavirus 7
  source 1..14274: mol_type = other DNA
atgaatcatccaaccaatgtttcaaacacacacacacaactcccctcaggggagttacctgttcggcggtcgtcccgaacaggtgtaaaaactaagacgataccgtcacacttcagaagtgcgtctgccggttacgaagccggtggaaggtacattacgaaggtgacaaagcatttccgtcataattctgattctgcagcaactttgatggaaagctacaaacaaatcaatcaagcccggaaaaatcgtggacaatttatgatgcaagccagtgtcacaccatctattgttaaggttgaagagtcaaatctgccttcgatcgatttgaacaaagttaagattggaggtgaaggagattgttggaagaaattattggttaattacagtccatcagaaccgcaagactgtattgatttattcaacgctattatcggtgatgcagatgctccaataggtgaatcatcaccatgggggacttatgaccctttgacgctggaagaaatagtcaatgagtacattaaaaccacaggccaaatcagaactttaagatcttggactgctgaatatatcaacatttggatcgtcatcagcgacatcacttcaactaccgcacacttggacagtgttttcaccagtgctgaaagacccgttgatgaaccagggaaaatcaaattgaatatggccgaattgacattacattaccaccctaatctcaaattcaaacagattgatggcgaacctgcaactaaagtagccaaagttcacaaggctattacaaaattcagtaacgaatttgttgctaaggaggctgaactgaaaagattgaaaattggagttactacggagtatttgatgcgatccaagtttttcgacaaattggaatttaataccgatgatgcaaattctaaagaatacatacaggctgtaactgaccatgactctcgatgtatcaacaatgcttgggctagaaataaattcaattttgttatcacaaccaaaccagataaagtcgttgacactagtgccgttcgtgatgttgacagtatgttgactgttaccaatgctgcaattttgggcgatgcaaatcaaagattcttatttgatgtggccctatcttatggatacttgaaccttgaaccaaagttcacaacgatcgatcgcgaagcaatggaaatgttgaacaaacaaccattcttcgaaattaccgaagcaattgaaaaccacactcttttgacaaccaaccccgattttgacgatgttattaaacataacattactgtggctgtggtacctttgctgagtaaagaaccagaaggacctttgagtagtggtctaggttattacaagacagattccaattgtagttacgtatcttggggcacaaccacgaatgtggaagtgtacggttggataaccggtttaatgcaaggtgatcgcagcctatcaagaaatggacatgttgttcatgttgtcagtaggaaaattttcgacgctgttcaagtgatggtgttatcacctttgacaactaataaaacacaaattggagaaataaccaccagaaaatttgaagttccaatgttaattccgacgagtttatggtcgttgggaatacctatatttaaaaccgttacttgcaatcttaacttagatttattaaacagattgataaataaagacttaactggaaaagttagtccggaattgttgcttgaatatggaatggccttatcttggtacagttacaacaaaaggggagttgaaatcagtgaccacaaaattgatccgttcgatgttaaattacacgtttatattactaaagtattagtgaggagggagagtttccttcagaatttggaatctatggccttcgaaccaggattcaacagcgtgttgatttctactgcagctgctgccatagaacatttaacaggaaaattttctgaggacattgaacaaaagagatcgataattgatagcgtcatcaatcgactaaaagtcccaaacatcacgaattcatttggtgaagttttggataattgggctagtattgatgcttggacgatgcgaaacacagttgaagtaatggaagttgttgctccgccaaaatgtcatcatcataaatactgtccacaaccaattactggaactgaatgtctacattgttttgagcctactgcccttgacaacggttattgtaaatgttgtttcaacttcacggattgtctgcatgaatgcatcagcgaacattccacaggtgaattgatttgtggttgttgccacaagaggatagaagaagtttgcccttgttgtcgttcaaaacacatcaagaatgttgaagatactgagcctgaccgtaggacaagaaataaaactagagcaagactagagcggaagagagtggaatctggacataaggaaaagcctgaaacacaagtccccaaacccagctattctgcagtgactcaaactgatactcagacgaagtcgaaaactcaaagcacgaatgttgatgatgtagtacaatttagcaatgccgaattagtaacaatgttggctgagaacgctgtactcatcactcgagatgaaatgagcttagaagatgtggaggttgacccatcttctaagttgagcattattccttttgttattcagaagcacccggtggaaaaattgtcaaatttcgaattaattgaacttgtcgaaccaatgggttcgcttgattgcggaattaatgctgttagacattatgtcggattagattattcatcgactttaactagaagggtaactaacaaagacagtaattggtcaacacatattctatgtcaagtgttgaacgcttacggattgaacgcagcaatcattgaaccgagtggcgtcacattccaaagagttgacgatacagaagaattcgcttgtataatttatgaaacgagtttcgaagttgaatctaatgaacaatacttgcccgactatcaacattggaaagttggaaaaattaaaagaaaatcaatgtacagaatcgaagaatgggcctatcctcaagctacaatgcaagaatatgcttcaacatctttgaaaatgtacaataaaacgtaccccgaattaaatgaagaacaaaaattggcagtttgcatgagtttggcctctcataatgtgttcaaaccaactgcagcaattaatcaaccaaaaatggagaatggtcgtttgttcaatagttctgtccacaacattgaaaatggtttattcaacgtttcagttccagatcaataccaggcaatagtttcaacaacttttgacaatttactatcgccggatgttcctgaagaactcaacaaagtttgggacgactacgaaaacgttctaaacattaaagaaaatgttgaaagtgccatctacaactgtctgtttacaatcaagaagacaattgccgatcctattaaatattgtaggtcaaagaaattaaatgtcaagaaagctggacttgattcttatgttgatttagaaggcagtcaaatcaaaaacggtgacatgttgataattaacaataaaggtgtcttcgaaccaatttttgtcactgtacgaaatggcagaatcaaaatagaaatcgaaggaaagcaaattagaattgttaccatttacgttccaaaacaatcgttcattagcacgattatgagattgacttcattgtttaaggctaactttgatgacactgctttagaagtattactttctacttctaaagtcctatacggttatggaggatgtggaaagactacggaagttggtaaatggagaaagaataatcaggaagtcaatgtcgcttttatcgcttggacaactggtggtcaagcttcattgagagaaaaattgcctttcgaaaatgtctactcatttgaaaaatacgcacgtgaaggaggtctccacgaaatgttaattattgacgaagcttctttggtgcatgcctgggaattatgtctcatagctggaccaacagttaaatcgttgtggattttaggagatttaaatcaaattgctgctgttgacatgaacatatccggcggagctagattaccgcagaatctgctcgctcgagccatagataaatcttcagaaattgaatatcgaccgtggacatacaggttaggtaaagatttggtaaatgaattgaaaaagaatccaggaatggctgacattgaatctagaagcaagagtaatactacatttacaaccgaatggtttgaagactttgaagcatcaaaaatttatgaaattttcaaagactgtgatgttatattgtgtttttacaatgaacatgtgtccagggtatcaaaggtaatgttacatagtggaattaagaaagtaactacagttaccaaattccaaggattggaaaaaccaaatgttggagtgttgcaaatgggtttgcgcaatgatgctgatatccacttggattacaatttcggagtttctgcggctactagggcttcctcccatttagtttgggtaagtgtaagatgtcatactgacaaaacaccgttgagtgacagacttggaacgaaatattctggtttattattaagtcagatagacatgaggaacccagtaggatttttggcatttgctgatgaaaacgaaccaattaaggttattgttgatgaaattccagaattaacttgggatgaattggtcaccaacgttgcaaaatcagtccaaccaaagcatgatgttagcatcgacgattttagtatcaacaagttcagccaattgttaaaacattttgcaagctttgttaaagttgaattagtgtcaaagacgtcagataaattggtgttgaatttcaaagcttttggcaggaaagaaaaattaacggttaacagcaattttgatttaacgggggctattccaaaacagttcacaacacaatttgaagcaatggttaaatggtcatgtaatgctaaattttcacaagacaatcctgtctttttgtcgaagaaggcttgccatcgtttgcgaattctagaattcattattaaagtgtacaaagctaacaacaaagaatataaagttgagtgccttcctgggcatactttcatagttgatgacaatagttgcgctgcatgcggaccgctcactattttaaataaaaagaaacatgaagtattcaatgttacaaaggattatttcacagaaaatgctagattatgcactggccacttgaaagaagaaattgtcgaaatgttcgaaagtgactcttgccctttaattccagatgaattcgatcatgagaaattatctgtagcgattttagctgaaagagtggccacttggcaaaaagatgttccacatgtgttgaagagtggaggaaagtggatgtattgggatgaaactttcaacaaattgttagcaattgaagttaaacgtgaaatagatcttgatattaaaatcaccggaccggatccaatgaggtggtatccattcaaaaagaagaccggtttgctatcgcgtagtacttcaataagttacattaaaaacgataaaagaatcgtgactaagtttaacaaaccaatgagtctaatgccattcattctagaatctttgttgaacatgtatgaaacttacgtcaaggaaaagaccctatcacccatagctgtttctttatttaataaatatggtgcactaaacgactttggcatggttgaatctattgaatggcacaaaaacaggaaaactgcggcttattacaatttaactagtagaatgggcaaattaaaaattaaaagtttggcttacgaaagaacggtgttgagcttgccgaaagaattgttcaatgcctgtgctcatatagatccaactttgaacataacctctaatacttttggttatttgggtgaaccttatgaagctgccagtgacattattcttgttagatatctgagtaatactcacaacattgacgattatcaaattagattaaattgtatcatgtctacttatatgaatgatatcgtgcaaccggtgtatcctatgatcggtgttgatccaaagagtgctgaaatagttgttcaaagatcaagttttgctaatattttaaataatcacatgaaacatttggcagacgatcatcctttattcaaacctatcaaacaacagttagatgaagacaacgtgtttatatcagataaagtggacaaatcaaaagaaaatctatgtactggtccttccatcgtatctgatgttaaaatcttgtgcaagttggccaccacttatcgaaagataatattttggttacctagcaattgtttcaaagtaaaagatactagttatctttacattaaagataagtctcaacatgcttacaaggtcgatcctgctgtactagaaggaatcaagaacggttttacggttggagattctgcgacacgatttagaatacatttacttaaaactctaaatcatataggcatctttgaaattagcaatgggaatggcaacctatgggctactccacatgagaaaacctcaggtttcattaaattgactttacctaaattggtaattgacccctcgaagataattgacagtggtcaattaattcaagaagacgttagcactttcgatattgacgttttgaataatttgcgaaggcgtatgttgcgtcctggaacgaccgaagacgacttgaaagttcaagctagaacattgctaaatactgctcaattttcgacgaatagtatattccaaaagtataatatgacagtagctgccatgatgaaacacatgaaagtagcttatgcgattagtaaatttgaagatataatgctcggattcttaaaaggaaatagttggacagatgatctcgaaactgctgggatttcgataatcgctgatttcatgcgaataattgttccggacttgccattcaaaaatctgatttcgagcataccagctgaatatcaaaacgttttgttcaaaactatgttagcgattactaatcaattagataaaataagacctataacaataggtcaaactaaatcatttgtaactgaattaaattataacaggttaggcttaaccggatcgctaattaagttgttcagaaacagtaactatgtaaaaattactgcacccacacatttgtacagaattcatggttgtaaagaatgcgaatcggcagttaaatatttggagaggtgtggtttgcgagttcccattgtaaattcacaagtgacgagagatttagttcttaaaacaagtaaatgcacacatacaagtcaatttgaatacacgttcaacactaaactaatgggattgcacactccggtccaccccgaatttgaagatgggcaattaatacccatcctcgatccaaaaaccttgactacagacaaagatatcaatgttcctgaattgaatgctccaatagaatgggcgttaatattaaattcgtcggtaactgtgacgattggaaaacgtttacccgttgtgtacgttcctatgaagaacaacaacgttgtaatttacaacaacaaaccgatacacaaatccttcccgattccgaaaaatccaattgaaacgatgattgaatacaatagaagaatactcaatttaactaacgaaagtgcaatccacctaccaggtcaaaacgtaactgatcaacgtttgagaagtgtgttgccgtctgaaatgattgacttgaacgtttattcaaagttggagtacacacggaatgtatttggaacagatttcgacaatctaggcatgattgttggaagtgatttaagaattgctccatgttattgggcggaacttcatttaaagaaaaacgctcatttccaatggtgcggagttgatgaaaatggaaattatattccaggacaattgtataatatcaatgacttagaatctccttacttacgacctatatattcagattggattgataaagatgactattctgtagttgaaccatcaacatttggagctccaggcgacagggtagtagccatgaaagctggagaaacatacaccagaggagtgtctgacactgaaatgattgtcagaagagtgggactaataagacaaggcgacgtgatggagacaaacaattcttattattattgttcagattgcaacacaatatattgttacccgacatttgtacacacttatttgtgcgaaaacggtcacaataccatattagtaggacatccaaagggtttgtcagatactttaccaccttgggtcacatttaggaaatatccaaaagatttggttgaattaactgaaagtgaagatgtcatagaaacattagaaaatgtaaccaatgattatgagcataacgcttttacaccacgttcatttgattcagtcctcaaatcgctacaaactaaagaattattaggatggaaagaaaaattggatttgtcagacggcaataaaaccactttgggttctgcagtttggacacttttgacaaagaaagaaagaaaccatatttgtgacattcctggatatttatcattggatgcatactcatggatagctgcaactcataaaagacattggttgcaaggcagtactaataattatgattacgctaacgactttttgccgattaaaacctctgcactatggttaaatgggataagagggcaagagtggtggctgaataatgacggggttctgtacatcagtgatcctggagggcttgatcaattctttacacaaatgatttgtctaagtcaaatctatcataatgaatggattattcaaaattgtccagctgggtttactttatgcgacgttaaatggctcgattactcatgttgcacaaaaatacaatgggtgaatgaaaataacaaacacgtaaacgaagatatttatactgatttgattgacaatttaaatgataccaagtatcaagaaggtatcgcatcaatgactatgttatccccaggcagttgggctctggaaattgctagaagtgaagatggtttgatgtcttacggattggcttgtaacagctggaattttagcagaccatacataggaaatgtaaatcacggcaataaatttaatgacagtccgctggagatagatacagtaattccgttgcccacagctaccagattccctgaacactttagttcatggcaaggcacttacgataacaacactagattgtgcactaatttatacaccaaaaacgacgtgagaggttcattgattttgcctgcacattctgaaggtcttccacctaaaggagtactaaaagaagaactcgatgctaacgacgcaaatcaacatggcgttgggtggctaactggttataaaaataaatgtttacatccaaacaacaatttgaagagaaccagacagtacaaagtttgtgggccaaaaacttgtgttgcagatttaattggtgcaaacaaattgggattgcattccagcattgttaaaccagaacagtttaacaaagtaactgacatggtaattcctaaaacatcaaccgtggatgttgttgccattttgagtgttagagacgtttctacgcttgtcaatgatagacaatggtatcacagatacatgggtttgccgatcgattaccaatcaacaagttcgcaaaagaacgaaagtgatgaagaatacaactcagatgtggaatcagatgaggaatccgattctggtagcgatgatgaagaagatcgggaatcttaccataccgttgatgaagaaaacgaaccgagtgaaaatcaatcaggtaatgatcaaattgaagaaaaggatggtgatcaatattctgattccgacaatgaaacaattaaagctgacagagacgatgagactctcgacgattacaatcccgacgaattaaaatcactagatgaaacaatagacggttcgtactcagaaaacgccagacatttcgtagaatgcattgggactgaggaacataaggatgacgtcgatttgccagattggtacattgaacaaaatttcactctaagtgatactgagtatgaaatattcatcaatccagtaatgcctaaaagattggctaaaggacgtgacttattgagtgcaaatacccacggcaccagtaaggttttctcaaagggggttaaagtctccgggttagtatacaaagccttgaagaagttatacaatattatacttagattaaaaataaagcactctgacattgttcacatttatgccatgcatgaaggcatagcagaaagatcattgtcgataaacaaaggaagacacatctgtttcaccacaaatgaggctaaatacaagagtagaggttttgaaacaataaaattgttgaaagaacctggaagattaggtgcatgtttgagaccaatattcggaatgttgtgtcctgaagccaaagccattgtaactcatgggggtagagttaatactcatggaatatggattgaaagatgcatggaatgggtacttgataataaagaatgtaaatctaacttcgccgttagcgcgtggtccacaatgactccttatatggacggtttttgtttcattccaggttgcgctcgtagtgcaaaatacatcaactcgaatattttatattctacaatttatggcatagatgaagcagaaattaaagaattgaatctttcaaaaacttatattaatgccaccactacagcgaaatattcaaatatcggaatacatccaatcctaaaagctatggacgagcaacaccagaaagaaaaactcccagaacatttgtataaattgaatgatcttccaatggtctttgtcaataaatcgctcgtttcagctagcaacgtgaaattggcttggcatcatgatgggaatgttttcaccaaagaaactagaggttacacgatggaaaaagatcctgagttcgaagcttggtttgagaatttcattcaaggtgataaggaagttaatctgggtttgaatctgttacaaaacaaaaatgtagagtatgtagcaaaagtggatggtgacgtgagagtattaatgaatccagaagtaactgaaagctgtgtagaacattgcgtgagaagatttttgttcactgaaatatcggaagccgacccggatgacatcattggtcaagggtggttcaagagcttcatgaacttggacgaaatcaaaagttcattattcacgatcggcctgaactacgaaataatagaaggtgataccgtttacggatgcttgtttaatgaaggtccaaaattacaaatcagattatctaaaaaccaatacggtcgaggtcacgcagttttgtgtgaattcaaaattaaaaactttgaagaatggagtactccaaagaagtccgtttacaaggagaaaagagatgaaattttagctaaagaaggagcctggattgatttagatgcttacttgagtggaatttctgatcggtatgatggaatttacgatttcaacgacgtcaaaaatgctaaagctagaattcgcggaagacttgacattatgtcacgcagaaaacagaggaccatcatgtgtgtaggtcaacaattatctaattgtgaggctttacaaattcaaggagtgggaccaggagctttgttatgtttcagatcaagtaatggtttgaaattttcggtttcagaaaaattgaaagacaattcaataatcgtccgcgtcagggacgtctattcaagattttgcatagataccggagccagactaaaattaaaggatgctaaaccagaagtgaagaagttaattttagctgagcaaagagaatatgctttcatgtcttactcagataaagcttgggcaatgaactcgatgaaaaccctagcttccattccagttgactccaaagctaaagttgtctatttgcgtaactttgacaatcgtgcgcatcacaacttcgatctgagagaagatttttacaatcgtgatccgaacacaatcagagtaatgggcagagtgggtttcaaattatcgataagtaatgaatcttgggctttattcagggaaataggcgatgtcaaattggtcatagaagacggttatgtaatgatagcaggaaatggatgttataccgaagacaaagatttaaagttgatgcaatttggcatgagagaacaagaaaagatagaaaaattctctgagatggatgaaaactctatcaacatacatcagataataggaacgttgggtttgatgaacccagaaaacaaggatggcgacggatggcggagtgaatgtgaaggatctcaattaaatctgtggtcacgcggtttcaatatggggtatgaatatcctgaagataagaaatttgaagtgacactgattccactcaaataccaaaacaaaaatttcgagcatttagttaatctaaatagtcaatacaaattatgtaattggaagcaaggattaggagtactgatcaatttggttggagccggttacatggaatacgctatgaagaacgtcaaaagtgtcaaagtccatgaaaatatacttgacagtcacaatactattgatgatctagcagcgaacactattgcaagtaagactgatcaaacatcactagaagtgaagcaggctgtttacagcgtcacaagtttaaacaatttagtgataaatgacgattcagataggtacactctgatgaaaacagaaacgggattgaccgagaatagacaagccacggttttgtatggaactggtaccatgactgatccaataaatggagaggtgtatagagtacctgttccggctgacacaatgaattattgggatgatgaaacagctatgattggcggaacaatgaaacttccaaatactgacattaaattacaaaacagggaagaatttgatggcgtaaaacaagtcgagaaagctataatggttcagtacccatcacacagtcaacccgcatacactaaaagaatgacagcagggttacaagctgttagtgatttattcggaggaaaaatagctttaagacaagttgaacacgatcctttacaagatgcagatttattcgaacacacttatttcaaacctggagctaaagctgctttacctagtatcgggttgaatcctgaagctattcttgattggttaaaggaaagacctgacaaagataaaatttgcgaggatttgatggacttactgacgtctggcttagacataagaggtttagataaagtgaacgttcatatgaaactagaatcgagaatgaaagacgttgccatgcatatggataggatccttaatggacaaccattagattcaaacaatggaatgccggaaacaattgatgaacagagaatcagattgatcgtttggcaaagaaaaggcattgctgctattttcagtcctttctttaaagaagttaaggacgccttgaagaaagtattgatcgacaatgttgtttacgttgatggaatgactccacaacaaatcagtgcaagactaaatcaggtggatggtgatgttacattcgctgaagatgatttgaaaaagcaagaccgtcaaactgacagcacattgatcgacacagaaatggaaatatacaagaaattgggagctaacccatcaattgtgaatttgtggagaaacgtgcataatcattggagggccaaaggagttggtttaaaatttgttggagatgcaagcagacacactggacaagccacgacggctttagggaatgctatagttaatttgatggttaaaagaagattagtagccgaattaggtaacaatttacaattaatgatggttttaggagatgacaatatcattttaactaagggagccattactgaacagcaaatttctttaaatagtgccagacatttcaacatgcaaagtgagccgtacgttggaagaatatgcggaggatttttgagaatgattatcttcaaaaacaatgttggatccttaagtgctgggcctgacgttattcgtttaagaaggaggttcgaagtaacaaatggagtttcagaagctacagaagaaaatttaatatctaggtcgatgagttattgcgtgatgttgggagatctaccgcctgtgagaagaatagtcgaaaaagagggatggccagtagaattgtctaaatggtacgattggcacgccctatcgacgtgtttggcaagcaaatatagatgctcacaggaacaagtggaaactgaattagccaatttaattgaaatgattgaaaaacgtgaattcaggaccaacacgaagttgatgttgactagtaaagggaactag

SEQ ID NO: 1247 - DNA, 13479 bp, Rhizopus microsporus endornavirus 1
  source 1..13479: mol_type = other DNA
atgaatgacctgaataaagttattcgaagaatcacaacaactaacaactcgcaaggcgaagctgatagccttgcgagatcaattaatcagcaaaatgagaaccaagcaattcttagcgcagacgcacgatgttggttgcgactaagtgagttgttttggcacatcaactcgagctatcctgaacacctcctcggtgtgctggattcagatatcgtgcgcggtaacgatccagagaattggccacggtatacatacacacttcctttcagcagggtgaagtacatgaacacagtagctcaaaacggtattgaaaagggccttgaagaggttgtgcaagaactatccaaccccattacgtcgagtaccatacggttcaaaaccaatggtctctacagtttcggagtccaggacttcttgttcaatggtacacaagtaaaattggtttctctgaggctagtatgggaactcatattacgtgacgcgccccactgggtcattgtgcctggattaaccattgcagatggattgtaccatctcgatcccgagaagccgactacgagtggagtgttgcgcatgtctgtttacgagtgcatgaggaaggcagcaccagtggaattccgggtgaccatgagctcaaaaggggtgttgatcaacgggatgacgccgactgagcactcccagcggtccacgactttgacgattggattcctaggcatttcaattgaggagatcatgtcgtccctaaggatggagaaaagtagcgactttgtcaacaacacaattgggcacgacagtctcatagtcaacaatgtgctatctcgcactcggttcgacatcatcaacacgcctacaccattcgaaaagccatctgaggaagagttgatgtcatcagtgacatacaattatttaaacgatgtggatgatagcaattttaaacatgtactattgtgcttggtgtacatggccgtgaaagctaacatagcagagagcgttatattctcaccgtcagttgaagaattaatacaaaatcaggattggatggtggctgacacgctacagggagcaagcacccattacataatgttagcatgggaccaactgccgacattcgccccagactacattcacattattggtctcaacctatccggcggagaatatagcaccatagacaagtccgaaatcgggcatcagtttaccgtgggtgagaaaatattcatcagcccttacaattcaaacgaatgtttcgaatacacctctcccggacggttggctttcactggttctagatacataaatcatagaaacctcacctatggaagactagtagaccaaaactacaagtcgggttctctaataaccttcacgagagaacgccactcaattgtcactaaagagccgcaagtggagtgggcagaattgcaagtaccttacataaatccgagcttgttaactacagctggcttgccgcaaattacgacaaaacgggtgttgctgaacaagcaattgctgaatgatatgctagcaagaaatctgtacggagcgatgtcttatgaaagtttggtggaatacggtttgagcttgagttatatcaaatattacaaaggctcaatacctgtcaacgtaaaagatatcgatacggaaatgatcagaatccatgcgtatgttgcgtatgtgttgcaacaacggaacgagttggccacgaagctaactatcgaagctctgacaggtagtgcagggctcagattgagccttgctacagtctcggctatgttgaagttcgcattgcagcaaataacagtgtccaacgacgacaactggttcacagataagctgtccaaattgttgcgtggtattagagtggataacaaggtgggcaaattgtccacacattgggctgatctagattgcttcgctagaacctccgagaatttcggtataatagcaagtggagtttccaattgcgatcaccattacgaggggaatttgtgtgactcagatataaccgggattatttgctcgtgttgtaagaacctaaccggccagccagactacgtagatttatgtatccattgcaagccgtcaactaccccaaggcaggtaccggaaaaaccagatatggatcattttgtcctagctgataacttaactgaggagcatgaggaagaaagtatggattgggaggtccaggaggaacaagagtgtcatgatcaggcagtgatagaaccgcagtatgacttgggacgaacagctgaggttccaagacaccaagatccggccacaacagacgcagaggaactgaattctgagcaaagggaaggaagtcacggtagtgcatccacgagtggcgaactagactcggttacttctggttcagtcacggaggatcagacaaccatggaaactttgaagattgcagtggatccactcgttctacgatcttggttgaatggagaggaattagaggaccaagtggacaaaacaaattattattcaataatacccgcaatccccatgggtgagtcaacagcaactgtgtccgatggtctgaagataattaaaacacttcaggtgcctgaggaacactgtggcacagaggtgataaaactgttcactggagtgggactggatcctgaatggtgtaatctaaatttgggctgtagggaacctctaacaggatcccaaatattaaaagccttgattcatttcaaagtcaatgttggagtaatagtcaacaacactatcactttcacaaaggttgtgaatagtgatgaatttgccgttgtcaattatatcagcagagagggaatactaggccattgggaagcggtacaggttcagaggacgaaggtcgcgataccatacataatcccgggtttaggtttggacgattacgattccttagcacttcaagtacacacctgcaaattttcacaattgagcaaggaaaagcaattgcaagtattaaaattgttatcgatcaaaccaaaccattcaacttactctaagcacgtggatctaaagcgggtgggaaacaaactcactaatggcctcacgagtggcacaccgtttttggatgtgaatatagagatcgaagccgaataccactccttagtagatgatcttatgaagaagtcggatattgttgaaccaataatgacgaaagtgacggatccatgggatttcaaatcaaacttgatccaagctctaaagatcagctataggaacttggcggccgtatacaactttgaatggaagcccaagagggtgatttctgggacgctcaccaacaactcgagtctggccactatctttgtgacgagtaacaaaattaaaaccggagacgtagtggtggtcaagggtcagaaatttttctacaagggccctataatagcagctaggaataggctggttattccacaaaacgtgtccataaggcagagtatacaagtagcagtacaggtaagtaagataagttccaccagcgaagttaagaggattcaggcttgcaagagggttcttgcgaatccatccctaatggaaaaagcgaaagtgttgttacgaaacgcaacaggtattaggggaatttggggctgtggtaaatcaaattctattgcaaatgccatacaagagtcggaactagttgaacaagctgtagcggtcacccgtggagcacaagctgggttggtcgccagattgggcaacaaattggttgctagcatagagagttacagttacatgccagacgcctccgtggaggtattgcacattgatgaggcaagtttgttgcaaccatggcagatctcgctgctcaccaccgccaatttgacaagaatcaatttgtatggagacaagcaccaaattgctgcaggatattatgagcatgagttcggagtcgtggtcaaatccaacgcgctggaattggccgccaatcttcaaacggctgattttacttaccggacaggaaatccgttgatgcgtgagttgaacaaagcgctgggaacctcgtacgtgaccaaagcagagcacacaacagatttcgaaatccaacaaatgaaccttagagatgaggttaaactgaagcagtggatagaagaatccgatgtgattatatgcttctataacgaccacgttcaatacatcaataatttgataagagcggatgccatgctgatgtcgagattgttagcgaagcgtaacattctaccggtagtagtcaccgtggagagttgtcagggattggaagctgaatccattctggtttaccaagagccgtttggtcgcggcaacgtccatatcaacaaaacttttacactcgcggcagcaactagaggcagaaaacagctacgatgggttagtgtcggaatgggaagttcctctaagtgggatttgaggcaatgtctgggttatgatttgctgggccaagcacctgatagagactccgccactatcttaatcggtccgaatggagcagagttggatcccagagaggtgtcagttgcagagggggttgacctggaagacttgtcaaccgaggagatcaatgaactagtcagcaaattggttttcaagtacatgggtgaggaagaactaataaacacttgccagttcgatgatatacaccccgccattctggaaactatcataagggagaatgccaagaagttcaatgccagggtgaaagtcaccttgagcgaggaaagtatacgtgttgacatcagggtatatcttgtatcaaagtatttcattatcaatagagatatgcaagtgtctaccgacttatcagaagaccacaaggttcaactccaaaggactataaataatgtgtttggtgataaagtcgttaaacgcctggcttcgaagattgacaaacctccgatcagagtctggagtgtgctatcctcagaaatatctaggaacctggtaatgatcagtcacttagcaaagatacacgaattcatggctacgacctttacattgaaataccagtctgcagagttgctggtacaaacaaccgggggttgttccgtatgctgtgggttgaagattactagcgtatcaaccggatcgacacttcatattacggaggattacaatatcacaggggtgagatactactctattgagggagaggaccacatcttggagtccttcatcactccagacggcttcaatacaattagaattctggggaagccgataaatgaaaccacagagtggtcaaacttgttgacagcagaacggatacataaattcctgaaatcaggaataagaaagttgattaacggaggacaactaatgcattcggaggagaactcctctaagaagaagttgcttgaagtagaactggccaatcgagcaactttcgtaggaaagttcgatggctatagtcacgtggagaactggcctatagcgttaaaaggaccagatgacaggatattctataaggttggagatacagtgattaaatccacgacagcgcgaagctggttcacatcgacaggaatggacctgagtgaggcggacaaaagaaaaatggtagagctagcaatgagaagtgatttggatgacttccagaagtatgcagggtatgcagttgtggaaaacgctagaaggaggttattgggagcggatcctttatcagcgatgataaaaccattatcctggcacgagaatcaaccatctagtaaggtggcagataaactcagagacaaagtgacaaagttgtattttcagaagaaacgactttcaaaccgagttttctatacaccaacccccgtacacaatctgatatcggatttgtataagttgcctaatataacggcagcaattacgggagcgactcagtgtgacgcgaatcttgccgccgcggagatagtcgtactagacgcagtggcatcttcccggaatgacgtcagatttataggagaaacactattctcggcctattcagcaaacctaaatctaaaattctctttaccatggtggcattctcagctcaacgcacaacactccgcttctttgaggactactagggccatgatattgaaccatattcgagcaattaaacggggggaaactgtggagaatgaaaacgaggcccaggcgctgatagaagaattggagttattctcagcaaagagagcatgtaaattttactacccgagcaaggagattaaagagagcacagtagtgttaggtccatcaatattcgatctgatagaaactgatgtggtaaacctgattttatcttctaaagagttgttgttttgggccccgtattaccaacacgacaactatttacacttgtccagatccaaaatagtgataagaccacctaagtggtttaaagtcgagggaggacacaccattctcgatggaaataaagccacaatattgatcaagaaaacgttctctgacgtagctctgtataaattagtcactggtcacgtgacatatgcctccgttcaaacagcacggcacaataaggtgcaggtacctatgccggtgttcctgctgagccccgaagaaataattgacaacaagagctttataaaacatgaaaaagtgactgtagatatagacataatttcttccctcatgaaaagaatgttgagaccaggtaccacttttgaagacctgttagtgcacgctagaactttataccactcggataggtacagttcagtcaccatccacagaagcgttttagagactgctgctgaagccaagaacgcagctatagttgcttacttgctccacaaaacagaactaaaaagtctggacttgttcacgggacagagagaccagtccatcatcagacaaacgttcatggatgggttgaaatcactcttaggggaattgggcactatcgtggagtcgaacgcccattcagtgaaagtagatttagatagagtggtggaggaagtgacaggcaacaaaatgttagcgcagcttgtagataattttgtagaggaacttgataagttacaattaatgacattgcgaccaaaaaggagaatcaatcatcaagtacagaatctgacagatttaatgataaacttcgtgaagtggttgaggaacccaaacttacacaaaagtcacgatacactacaatctcaagaggtccgcggtaggaagtcaacgaaccggaaagctgtcgtttgtttcttcggcaccagaggtgatcaagcaattgctgccacagttgccaccgcagtggactacgaggaggtggtattgtttacgaacgaagatatagtcgaaaaggcatcagcccagctacatgggactagcgtccgggtggcttcgaacggattaaacacaaacgatatatttgcaatgtggaggacatcaaacccgtcgcacctggagtctttcgccatccagaaagtgttggaggaagcagtggattcagacctattcgttaacaactttaacacaccgatcttagaagctaaattgccgagaaatcctatagtcatagaatatacacccatggacgtgatgcatgaactgggaaagccagccatctgggcattccgacaaatctgcaaggtgattctccattccaaggaaattgaacctcatcccgagtccgagaaggtggttaagaagctgagggtgcaatattccagctttggaaaatgggcctcagccatcaacatcaatcctgtttctaacggatcaatactcaacaacaagtttgttgtgtaccacccactattagaagaacatttgattgaggagttgataacttcgctgggacgaaccaacgtagtagtagtgagaggatgtaaatacagagaaagcgatgtagatagtgtagatttgatcaacagcaaggactgtgtggtcctccaccatggtggcctggggacgtgtgcagcaatagcagccagcaccaactacagcctgtgctggccagtcatgaaagaacaaattcaaaatgcaaattatcttgaagttctaggtgtgagctccactgtcaacaccatacatgacgcgatttccgaatttaggagttggagatacatgggaaagacaagattgcgcttgtactccctggttaacagtgagctagccctagacaaagttatgaaaagtttaaaaaccgctgattacctagtgcaaccggaagcgtatgaagatagaatctcctactgggtagaggaactaagtaatagaaagggtttttgtaaggtggttgaacacaaggtaactttatctgacgtgaatgaagatctgaccattttcggaatggatcacaaactaaattgggccgttggagaggctagcggtgacttgtatgcagtggccaatgaacccaaatacaaccaccaaatagtcggccttaatatgtggttaattaactatcccagtgataagacgccggccatattcaggttacaacgacaagaaaaagctgtattcgtgcccacacaaaaacaaattaggtatgttgtggaggggacgtacatctgtatctcatgtaacaaccccctaagcagtgatccgatggcgcagtgcaagttgtgtactaggaatgatttacaaactgcaatctcactgagtggggaggaagctatggtatgcaatcaatatagccttattgactatctgtgcacgtgtggaactcacacttgcactagtgccaacgataagtggtattgcacatgcggcaagttgattaccgacggaaatgtgtatagagcaggggtcacgaatggagatgcaaccatgatgttcaagtatgtgtcaaacaccaggctaaacataagtgaatgtgattggagacaaacaattagagacctaagtaaagtaaagacgctccaaagcatggtagttattgatggaaggaaacccacggtaaatttttcaccgttcatccctcctccaaacacatccgaagcattcattaagaaattcaaggagttgatggttagggtgcagacgtacaaccgggatcaaccagcacccgctgaaatatcccaactcaagatcaactcatcacatgaatttatgcaaagattatcaactggacgatcatggaccagctcggagctacacttcgtcgatccaaagtacttaaagtcgacaaagatttccgatagtcaagcactgtttctagcgcgcgttgcatatgagttagaacagaacatcagccccggagcgactgtgggagtgtatgcactagaaccaggctccatagaacgcagcttgaaccaacaagatgattatagggtagtttttgcgtccaggaaaatagaacacttagattcagaaaataccatatggatagagactaaccactccttggggagaatcaacgcgtgcgtgaggttgttgccatggctgttaggaccagaagcctcctacatcatatgtggaggtcgatatggtgttcatggtatcgcactggaagaagtaatgagaaacagtgagtacaaagactgcagtggaactcctagtaggagaggttggttttatatggatgctgcgaaactcacaacgaagccgacaatgggagataggctcaaaataatttcaatcttactgaactatggaagtatatacggtgtggacgaagctgtagccttcatgtttccgaaaatgcatctataccattcggatagatgggattattccaacaccaattccccatatttcaaggatagtcgactggatagatgggctactagctgcaccaccagtagattgccagatactctgattaagggagtggagatcccattgcagtggattgaagagggcttcggagacattaccggtttcaataagtttattaaactcttggatgaaaacttcatcccaaggaaagagaacagtccgagtaacaggttggagccattgatgatagaaaaatttcacatcatgaaagccaaccgcaacgttaaagcaaccaggtgtgaactaacaactcagagaaccatctcaatatgcggagtgggaaatgaggaattgtttaacccagctgaggatacgttttgccatagggaagtgttgtattattgcgtcaatgaacaacctgatggcagcaccgttgaaaaattcctgaagctagactttcaaccgctagaaagtgtggaaagtctggtggtcaaagcaacctggcttaatttcggagtaataataaagaacaaagacaagcatacagtggaaattttcaatccgacttccccgacccttgtgcgcttggaggtctcagaaggaacattgaaaaccgcgggccacgtgaagctaatgaaggccgatcctgaatccaacttggaactagtttgtgaaaacgatagaaagtctatagatgcaatactgtcagaatcctacccaagaacgattgtagggaagttgtatgaccagattttgaagttggaagctctcgaaaggcagtcgcccattacgccggagtatatcggacccatagccaacctgcccgaggggttgtggaaagtcgtgaataaccagactagagtgctgatctacaagaaggggagtaaactcacatctaatagtgatttatatggtagtgtacaagtaacgaagttggttacagaactgcacacagcggatggagcggaccatgatataatggtgggaattgaagtagaagattccaagagcacgatctccaaccccaacctcaatcgtattagttgcgacgttcaacaggacgaggcaaagtctgaaggtccacaggacacacgtagggtaactagaggatcctccaccccgaacaccgaatcgacaagtgaccaaaatgaggtcgacactaaattgcaaactgtgttggagaaactaaattacgatttagatgcatcatatgagcccagcgacacgacccatcgcagagattctgaaacgtccatggtgaccgcggcatcccaagagaataaagtattcgccataggtgataacattgtcggcagtgtggagcagaactggtacaagactgtcagtgaacggagcttgagtcctgaagtcctagtgagggaagctcgacagaaaccaggtgttggaaaaggaaaagaattgtggggcaagctaaagactggactgttggctgtagagttggcggcatattggtgttcgatcaaatttaatcggaaagaagcaaatctggtcacggtagaagagcaaaagaggttatcctcagattcgggggacgactgggaagattacaggagacaaatagaaaccccagcgttgttttatgaggaagtgatagaggatacatttttattgaagtacagaatgcaggatcaccattttaataaattgaggaccctgctgaacgttagagccaatcatgaaattgaggttccagaggaggaagccgacatagtagctagggctaacacaataataaacttctactgggatagaaaggatgagatttacctacccagagagctgtccagtatcccggatgttgaaggactagtgttgtccagaaaagatctacttacgttatcaaggatcgaaggttggaatatagaacacttgccaaaccaagactcttacatgttcaagcctatcaaatttagaaaaggtattagatccaatgagttcaggtcaatagtgtacctctcagtcttgcgatttgaaccggtaggattcggtgcacttccggaagagccagaagaggaaatggcttacggagcgccagaatcctgggaaaatgctaaaatcggaacggataggggcccggattaccacttctttgtagagccaccaaaaggatcctggttacaatccgagttcaaaccaagtcgttatcaactgacatgcatggactcattaggtctgctaggcggcaaagtacagaggttgtacaaatgtcaggtggacaggtctgttgttccgttagcggtcagtcagggacctcagtccttaatattagagacttcgacgcaagggagtgagtggtacgacaagccactgcaactagtccctcagccgaaaactgtgtacatatacgaggatgaacacggtatgcttgatgtaattgttccgctaccaaacgtcgacataggtttaagagtgagacagcagccggtggaaattaaggaattcacaaaatacaagctcacaaattacccagaacaagcagtgccggcatacaccaagagaatgttaagttccacaattgcagtttccaagttgttcggttcccaggctgtccatagaaaacactggcctagacacgaaactgagggagagaggttggtcaaatattgttatggaccgggggcaagagacaaaatcctcacaaatcgaaggaatgagctatggtataatctagaggatatgttgcaatggctgaaacaacgacctgataggaataaaatcacgacagaactgataactgtgattgaagaaggtatgctagtacatccgttaaacatcttaaatatccacaacaagatagaagccaggctgaaggatgtattattagatgaggaatcgctggctataagtgacacaaacgacataccaaaaaccaaaatacgccaaatagtgtggcaaaagaaaggtttaactgcgattttcgcaccagttttcacacgcgccaagcaacgctttaaagatttgttagccggaggaaaagtattgtatgttgatggatacacaccttggcaaattaacaaacgcctacatcaaattaaggtggtgcaagacacttggttttacgaggatgatttagaagcccaggataagcagaccgacaaacactccctggatttcgaaatgtggtggtatgtcaaccacttgggagtaagtccagtattagttgatttgtggcgagaagcgcacaatcattggataggtaaaaatcaggaagtgcaaatccttgaggacggtatgagacagacaggacaggcaacaacagcgctgggtaacgctttgaccaacctagtaagcaagtcacgaactgtggaacggtacttcaacactatagacctgatgatgatactaggggatgataatctcattatattgcgggaggagccagacttgagcaaatccgtggaggacgctgcaatctattacaatatggtgaataaaccagtaaaaagtaaaactggaggcggctttctcagaatgcaggcacacatatctaaggagggctatgtagcattagggccggacatagtgagactaaggagaaggtttgaattaaccaacaataacagtgctagtgacgtgaaaaatctggagaatagggctgagaactataaatacatggtgggagacttgttcgggaagttcgggagcaaatatcccttatggtacgattaccaggaattgaggaagtctctagctgctaaatataacacaacagaggcggaaattgacaataacgctggtttactagtcgatatgatactggagaacaaagcgcaaccgtttactaaaacgatgttcgccaatatcgagcatagaacgttcaaaacgtaa

SEQ ID NO: 1248 - DNA, 11568 bp, Rhizopus microsporus endornavirus 2
  source 1..11568: mol_type = other DNA
atggtcagaaaacaaacaagagtacgacacacaacacttgatttcactaagggagccttcgaaagaaggttccccgaattatcaaactttaacaaagttagtacgcccagattcaccagcctaagccgccaagtcaagagggcgtacaaagccagatttggccaggaagtgccaatcgtatacagcatagacagaggcatgaatatagtcgtcgacggggatactatgtctgtgccacaagcagtcatggtgttacaaggcagggcttaccgtagtacggacgatgcccccactaagacgaacgcccagaactctacggcgttcagcactcgacgccggttcacgccgctacgcagaataccccacgcacttgtcaaggcggcgcagagattggtaacagcgtaccgcaacccatacgacactctcaacaggtattgcgccccgtaccgcaatctcaagatgatggcctctatgcccggcatgttgtcaacagcttactacggtcacaaggtgaacattgactataaagtcaaggtccacaggtgtgccagatgcaacatgcttaatgcatgccacaaggacatggtccaaaacaagatggcctctatgatggggctgagtgccgatgagtacgacgacccgtacaaccagaccttcgtcgattacaacctactcgattgtggattctgcggcgcaccactcaccctcacgccaatcagaccagacttcaacctaaaacctacgtttgaggattggaacacccccaaccacgtcggcgcattgacggaacaactcggagtgcttgggtacctggacggtacctacgatgttgactccgaatattaccataaggcgatggcgaatgacttgcgggtggcaaagttggctatgtccaggtttaacttcaagttagtgcaggtaccagcgaacctaacccagcaagagttggacgccctgcgccaagagttcccagacgtcatgctacaacagcagccaggaattgctaccagcagagatttcgacgacgccgttttagagtgtgccaaagccaacctcggacagagcttcggccacacccaggctgacattgtcatagaagcacacctagtcagcgtcatctcagtgttgcgcaactgcgtaccaggtgacgtaatctgtgtgcacagcagattcgggaaggtacacggtcaacgcaccgacagagcgcagctgttcgaactgtacaactccaccgaactattgtacgaagactgcaactacaccctctcactcagtgcggatgacagagatgtccttgaaagtgatgtagtctatgacgtgggtaaaacctaccacgtggtaaggactcacaagctcctcaacaacgagatcattttcatcaagtgcgtgccagggggtcacgtgagcaaggtggcgagcaccgtgacgatgagggcctctgacagtgtggaaatcgagctaccgcggattaaaccccaaggggtggtaaacttcaccggtctactcgccatgaccaccgagagggtaaagttgaacacaagactgctccgccagctgcaggcgagaaacatttcaggcgatcagacattccagagtttggttgactatgcaagagctatcgcccattccagagtgagcttcaaatccaaaacgatcaccaactacgacatcacacatactgatgtcatcaaccacgctatggtggcttacgtactcggagcacgagcacgactagccctcccctcggccaaaggaaggagtacgttgcaaaaccgagtgactgatataatcctcaatgagctgatgcaaacggttttcgaagccgcaacaaccgcgttccaggtccacgggaagggagcgattagtcatttgttcgatctgttggacgagtcagatatgctcaaattacagtcctatttgacccacccagcctgggacgtgtttgatcacaaatcaggcgaggtcaggttcggcagggccaaggaattgaacatctcgggggtcaaagtcaccgctgaagattcatgtggacacaggcatgacagctgtgagcacaacactggcagcaggacgtgcatctgttgtggcaggctgtgtgatgacaatctgtgttgctgctgctcagaggcaagggactgtgcacacgagcaccacagttgcacacatgaagggcccaatcgctgtatctgttgcttgaagccgagcacaggcaacttctgtgattgctgtgaccctgggccggtagggcaagaccccgtcacccaagacgggcccgatcatgaaccagattacaccagcgctgaccgtggtaaagaccgcgcagacaacagaaccagcccggaaggacaagtggaccaacaaaccactacagaaccgtccgagtacgacctgaactgtcagaccatagcagagaaagccacacccagttacctatcagtggtttgtgacgggccgtgcccctacatcgaggcaatggcagaaagcgggttactcaaagcagataccaaacaccacaccattctgccattcgtaccttgcggacgatggaacgcggcacaaggagcctttaaagtggaaaactactctgatccagccaatagcgacacaaactgcgccctgcactgtttcatgagactgaagaccaacaccagtctccaggagctacgacaactagtcggagagggtccccacggagttgaacacctggtgactctgtcacaagtgtacgagaaaaacctgattattgtcaccagcagttcaatcaccatatgcaagcgcgagccatgctccgagctcttcggggtcataatgcacaaaggctacgtgggtagcgacgagttacattgggtgttggccaacggacaaatgaccacgtttcccgatgtcagcccagtacaggccgagtatgtacccaactccatcattacggacctgtccagtagaatgatgcacgtcaaccactacccaatgtcactgagcgagtacctgagtgtgagaaaggacctaagggtcaaatttgaggcagcggtcctatcgtacatcggagaaaccacaaccatgacaccacttcaagtgatcaggtcaaatgactccgtggcactagtcaatgcccagggcgagcaatacaggttcaactataaggcaggaactcagagtggaagcattcttgcaaaactcttcaacgcgcgtgacccggattcagacacagatctctacaagtatgtggacttcggaggtgatggcaccactatcaccactaacctcccgcgagatctgctcgcagcgaacgtgtaccacatcaataagctgtactacagctgcaccagggccaacgggtcagttttgaggccctgggcacctgctcggctcgtgaggtgcggggtgggtaggtacgttgtgaccaacatccacgaaccccttaagacaggtgacgtccttacccttcgcacggcgcgtggcaccacaacgcaaatagtcaccgccaagaacgggctggcagtcgtgtcactagacccatccaaccctccctgtttgaaggcttccgtgcgtctcacaaagcaatccatggcatccctgctccgtagcacttgcatgctgagcacgatggacagcacgatcaacctgaaagaggcagattctcggactaaggccattctggccgttgcggggtggggcaagactaaccatattgtcggacaagcccgacggagggcgcaagaaggtcacaaggtactcctgtgcgcgtcatccacaacagctcaacaggtgctacgagagagggcaggccggtccatccaagtacggtctgtagaatccatgctgtacagacctcaacgctacgacatcatctatttagacgaggccaccatgattgattgtgtcacctggtaccacctggccagatgctgcgacgaattggtaatggtcggagatcccacgcaaatcggcgtcattgacaccatactccttccaggagtgcgatcgaaattgggagcagttgagcacgttactgataaggagtatcattggcagacgcgaaggttcggatcctccctctgcagagtgctaaaacctttttacccagagatcgagtcagtcgccgaccatgacactcaggtggagttctgtgacctgaagcgctgggatccacacgccattagggccataatcaagtcgaaaaaccctgatgtgattttgtgccaccagcatgccgtgcggcgatcacttagtcggatcactgataaggaggtgagcacaatacacaagttccaggggaacgagagaaacaaagtgcttctggtacaatatgactggacacacacaaaccagggaatcaccgttgatgaaaactacatgatatcggcggtcacacgatgtagatcggcgctgaccgtactttccatccaaatgggccagctgcagcaagacctataccatcgggtcggcagagggttcctaggttacggtatacaagacaagttggcgagggccatacataagatcatacgagaaaaccaaccgaaaacccggcaaactcatcaagacaccaagcccaagcgcacggccaagatagacagccaacaactgcacacgatctgcgagtacatagtccagcgggccaaaagcaaaggggtcaacgccgacgtggagcaagccggcgaccaagctcgcgttgtattcaagaagatgggattcgagcttggtacgctctggttcgacacccacgggaattacaaatccacaggtgtggtcagcaaacacctgccagaggatccggtcgccgaggccctcgcgtttgtcactgatgaagatcagaaaccagagaaacaggaggtgaagcgacgttgttgcaccccggacgaccgtccagacctgccgagccccgagttgaaacaccacaacaacatcaagattacctactctcagtcatgccgcctgatgagcttgcaccacgcacttatgctgttgcaacaatcaggagccacattgcaaataccagtcaaaggcggggccgtcacattcaaggcacgggcgggttgcagtgtgtgttgcggactttacatcacgcacaacggatcaccccaatattacctggtggaacagtacaaagacttcccgaacagacgagtctacgcaacggacaaagtcgaaccccaggtgacagagttattcgtcgagttgatgcagctagtgactggcaaagagtccacaaccgccttgcctcgcgaactggttagcataatgaacgtcaagcacatgtgggaggcattggtactcgaccgagccatgttgtggttacgccaaaactgtgacaaggtcaagtatgcgttgggattaggtgacgatccggggcactgccaactatacgctcaggctaatgagaagagggtcgcacagctaaaggctcgcatggagtcagatgggttgcaacttataccaggagatcatcacaagtacccccacatgcagctgcacaacaccttgggcctgggagccagcaccacaggcacgtacatgtgccgcctgcacccagacgggtacgaaaagatagactggaacgccagtagtctatcttccaaactcacattccttctgaacacactagaatcagaaaagttgcagttgttgaaattatcagacagtcgtaaagtaggcgccattgacggcatgacgttcagcttggaggaacaccgatcgcgcaactccccggtccacaaatggttgcgagaaaagacagagtcagtgcagctccaaatgctcaagaacaggcaagaccctatgtatttgccctcaaacttgtacagccaattccacgaaagcctccgcaagtgcgtgcctgagggttacatcaatcagatcagcatgccagccatcaaagcagggttcgatgcttgtattgatactgcgatgatcaagtacgccaaagcgaagccagcaatagtactcacaaaatatgcctggatccccgtggtcaactcgcagtgggagctggacccgtacaaaatggaatcatggcactcatcagcgagcacagaattcgctgagtcacagctagctcatgtctatgaactgatgcaagacaaatccatcaaagacccagcctcgcaagcggtgatggacaaactgcggtcacaaagctactaccaaacactaagtgacgccgatcttgagagagacccgagacctgtgatcgccaccacagcgggcctagccaacttagaacaattgtacaaacgctgtgctgccggcctacctactgtcttcctctgcccgaacctttccaccagcgggttccgggatgtcctgacacaaaacaagcgaggtggtgtggtgacggttaccgcagcctctggagagcactatgccattcccgaatcattgtgcgataaactgtaccaaccgggaagtcccgccgttcaggtcggcaccgtcgcaggtctgtctatcatgacgaacgcgcgtcaacccaactactatgcgaccaaccctggcgacaacagcctcggtacagtcaccattacgggaccagtatacactaaggatttggtgacagcaaaaacagaaggcatattccgatcacgcacagtcaggatccctgtgagggtgttccgaagcctgtgcttacgttgcacagtggccgacacaagcttcgaggacctgctcaattacgcgcgaaccctggccaatgcacggtactacagcaataggtccgcatgggagcaggtagacatgtcgatatcggacctccaatttgctagctcagttatctacttcaacaccaggggcgtgatggaacaaaccgagcggatggtcagattgctcaacacctggaacaccaccaacccgtgggccagccaaactctcgcccacatcaagacctcgttgatggaaccgtactccaaagtgctatctcacttcgggttggacctctcactggacgagatgttagaaaagcctgagctcataaaccgcatcaacaaacacctacagcaaaatgccacgcttaacaagcacgccatgaaaataggacaatcaagacgcatgattgtacgtgccaacagggaaaccaaggccgcacaaaacaccagcgaccacaaaccccggcacaaacaaagaggcacaacggacgtgcggttaaatgaatctgaccacgttctactcgccacgttcggttccacaggtgacatgcagccttttatagcgctcggtcgagagctcagccggtacgtacgctccgtgacgctagcagggcacgtatctctcaaaccactagtagaaggagcgggcctgaagttccacaccatgagaggcgactataatatatccatgaaggaccacattgaattctccggaccgggcgatcaactgcacataaaacagggagcgcagcggttcaaaaccgaggtggacgagttactgagatctttggacgagaccccgaccaacataacggcactcatcagcacacccttcagtctaggcacggagacgttcgcagagcgcaggcaactgaagttgatcacactctgtagtcaacattggggtcctagcaacagaatagccgaggccgcgatgaaccgccccgagtcgcctagcaccgcgttcatggtattactgtacacccaagttcaagatgtcattaacaagtaccgacaattctggggcatgaagcagtgcggtccagcggagctgcataagatgaggactaagtacgtgtatagcatgcttaaaccatacgcactagccgactccatgacgttgaactatctaggctgggtggacgacaacgggtaccggcaggttgagcgcgaatgtcacaccacccgcggctgcaggcgggcactcgtctcctttggatccatgaccggcacgattcgactatctgcggaacaggcggtttgcgacacactcttggccaatggatggcaagtcatgattgtcaacccaatagttcacagaattggggtcgataccgtaacaggctacgtcaactacactgagttggcaaagcgcgctgaggtgttcatacaccacggtggcgctggcaccacccagagatgtgtggtagaccaaatcccgcaagtcatcatccccttcttcggtgaccaaccaagctggggccatgccactgagagcagaggcttaggagcaactgtgcagcgcaaggacatccgggacaagcttatgtcagcaatccacacagctacatccgaagccgtccggagcaatctggcggctatacaagatttcaattggcgggaaagggtgccaaccatcctgctggaacccggtaccagaccgaaaatggacgacagctcaccaccacaggactccgacggcccctcgactggagacggcagcaacgaggacgcacccccgtcgaccaaccaagggatggagggatggcgcacagtcgaccgaggcgcctccaccggtgttaaacacggtcagctcaagtccgccgacgcatcaccaagtacccgtgacaaccggtttgaagtcctgtccactggaccagatgagacaaaccccgcctatgaaaggatggtacagtccaacaaatcggccacggagaaggtcaataaaatcagcccaggcctgtactccgtggtgaatctcaggaccatcggcacactgtacaaccccactgggaacgacagctgcgtgctggagagtctcaagtacagccgacccacttcattccaatcagagatatcacgaaagttcgctgcgcttggggtggccaggtacgtctcttgggatgagttcgaagacgttatgatgctactgccgctaaatatcgttttcaaacaggagcaccaaagcacaggaatactaatacggaaatccggggtcacacggacgacattcctggaggtgtcgcaccaaggcaaccggctacactgcacagccgtggctgtgaacgaccagttcgaaatcgtcgacgacttggaagacgcagatgacatcttcgacagcccgctgcagtcagatagggtgaatagtaagctgtgccgcgaggtgagcgaacaatacacaccacaggttgaccaggccatcacaaacgatgagctaagatacgccagcgtggacttggactgcactaagatcaaacaaggcttgctcaccagattggacatacaatcactcctcttacacaatcagtacatagtatgtgagaccgtccttgggcctagggtggccgcaatacagaagctggaaagagggttctggttaatcaacgtcaacaccagtgcgtccgggatcatagtcatccgaacaaaggatgatcttaaacctcgcggacagacgcaggccgtggatcagacggtcggggctgggtcaggtttcgtgttcaaggtccagaataataatgaaggttggcgtcaggatcgtgaacccgcccaccagcaccacgggaacgaggtgaacacgtccagccggatcaactgggacgatcagccacaccagccatcttccggcttctggcaagtcaaaccccaacaacaagttgtactgataccaagaccggcttacatcatcaaggacgaacgcgccatcaccgccctatgcgagatgcacccaatcttccaggacgtcgaatctctgctgggcttgacagagcgacgaaaggtcacaaagtgtcgtgaatcaggcgaccaggatcaagtaaccaaaatctataatattgcaatcaagcggcacgcagcagacgacaaaattttactctgccgtgacgaactccaactcctcgggaccaacagaacagccaggaccgtgatgctcgcagacgacgtggttaaacgcacgcggtacagacatatccctgacacgctacgatctggtccagacgtggtctgccaccgacaagagctaccttacgccgtggtggacgactgtggctggtcggtgcctctacctgaacggggctcatcgaaaatccacaacatcgcggcgatcaaattcatggatctcacccatgtacccaaagctccaaaacctgaccgatttgcaagagtggtaccaacatttcgcccttacatcaacgtggccactggtgatttctgcatggtgctatccgaggcccacatcgagcccaaactggaagcattgaccttcttccagagtaatgacctgaccgattgtctagtcatacacacaccagaaacctctgtcatcaaatccacgatgcagcccggcccgttggtcgtcgagaccaaaactgctctcacaaaatacccagaacaaagccggccagtgttcaccaagttcgcaggagcactagaaaactccgtgaacaccagattgggcgcggttaaaaccatcaggaaacacgccaaccagaccattcacagccaattgaacatgttctcagaggcttacatactatccaacgccaaagaacaactagacgcataccagagggagccctgctccttcaactaccaagaaatccacaaatggttacgagagcggcctgacgcagttaagatccagaatgagctcgagttgatcctggacgagggcttcatggccaatcctctaaaccgggtcaaagtacacctcaagcttgagtcgctgctaaaggataaaccggtaaaccaaccacaagataccatctgccgcattatcgcctggcaagccaaaggcatatgtgccatgtactcaccctgcttcatggaagccaaggacaggctgaaatctttactacggccagaagtggtgtatgcggacgggctcacccctgacaccctgtcggcgctgatgcgcaccacggacgttaattgccactttttcgagaatgacctgtcgaaacaggaccggcaaacagacgaatacatgctcgacttcgaatttgcagtgtatcaaatgctaggggttgatcaagatcttctcaagtcatggaggaccgtgcaccagcactggaggtacaaaggcgacaccgtatccgggacgttaaatggtatgcgactaaccggacaggccacaacggccctcgggaacgcaatagtcaatttagccatacacagcaggctagttctcatgaacatgcacacgatcaaacggatgttaatcctgggagatgacatgctcatcgtttcgagcaaaccgttgttaatcaaagacctcacaaagtacatagcggaccactacaatatggagagcaaaccatacttttcatcgacccacgggacattttgtagcatgatctgttacaaagcggaagagagccttgagttgggaccagacatagtgaggctacgaaagagatttgagctgccaaatggggtgcacgaggtaacaggcgagctcttggaggcaaggagtctgtcctatctacagatgatcggatggacacctgagactgccaggattgctcaccgcatcaaccccgccgtcaaattggtgcgatggtacgacttcaaatccatggtcgccgcgtgcggagccaagtataaaatgaacgcgcatgaagtattagataactacaaggcgctgttgaccatgatagagaagccgaaaatctaccaacacaaatgggtggggatcggaaattcgaaacattaa

SEQ ID NO: 1249 - DNA, 6558 bp, Sanya endornavirus 1
  source 1..6558: mol_type = other DNA
atggagtgcaatgaaggaatattgttaattaacagcaatcatttggatggtgatcaagacgatgttcttgcccttttgactaacctgcgcagaaccttcacatacaacaacaacatgtttgacatcataaattcatggttaatggatgattcaatttggccgaatacgggtgatggtttcttactaacaaggatatctgaaaggactttcaacattgtcagaagtatgctcaatgatgatgggttttgtcaatctggcacaacatacagagctttcaacactgaactatccaacagactgccccccggcgctgttgtggctataccaactcaccaaaaaatgtatgcatatgcagtcaacactgaaaacggggttgtgtatcaaccacaaaacatcttgtccactaccttgtgtcaagacataaaaatatgctctggtatacagggttggtatgatgaagctccgctatcacaagcaaacattgcactcgctgacaatatattgaataagaaactaattgcagacatgacagagaagaagtgtatcttcttacccgccaccttgtgcaagcggtttgacacttacttacagcaaaatactatatcatcacacattaataaagtcagcgcacctcataacagggacacgattgcagaagtagtggatgcaatattcatagagcatataatagcattcaccaaaaccaaaacgctcacatgtgtgggcgtggatgcacaaatattctgtttgaattataaaagaggcatgaggatggcatcacaatttgttacaaacggcgacaaaaccatattgagcaattttgtcaagaattacaagttgtcattggaaagtaaaatgagtggtgcattgtcagatgaacaattgctatcacttaaggaatcaatcagccattttagtgatgttaaaaatttcctgacagaaactgtggacggtgtgtgttattactcgttaaattccaaaataaacagcgttaggaatacgaattccttctgctgcactgttgataacgctagcaaatacttattggagagggacggtaaatactacaccattggtgattcaggtgtgatggttaaagtagggcacagggtgggttgtgtattgagactgggagagttccaattgacttgtggcacgaacaatgccaatcatccgaacctagtaaacccgctcatgagtgacgtaaagaaaaggcattttgtatcaaacaccggtgataacctacacatacacataccaaataatatattcagcaaattagtggcaagatgcctattagatcacacaacgttgaaagacgctttaacttatgccaaggcgctctgctcaaccatgttgtacacaagtgacagcgtacatttcagggaagaggttaatgttatggacatctacaagtacactgttttatgcatgaatgtagcctggaggaataggcagatggtaacctgcttgagagatgcaagcaatttgggttgttcaactgatgacaagacgactagtgcatttttatctttggttagttcagcaatgttagaattcacgagggattacaattttttgacaccactgttaggaaaattaaaagagttcgcagattccattatacctgagtctgaacaggacaaattattatccctggtgaggaacaaccagttcttagaagtgtgtcaaccgtaccacataataattatgcgctcagacgatcaacatgaatcaatcacagataacaggcaagacagtgatgacgatgaagttgcatttcatgatgccgaaagcggcaatgataatcaaaaccacagtgcaaccccaaacaacgatgggaataaatgggtacaatctacactcaccactgctcacagctcgcatggaggtgacagcaatgcacccagtgcaaacgaatctcagacagatgcaagacaagctagcgatgaaagcaacaaaaaccgaagtggcaaggaaacaagtgtaactgcaattgacaggacaatcgatattatgtcgcaatctgagatggtagttacggattccaacgtcgttaatttgattttggcacacaacacaattaatgagaataaaacaaacaaccaagtaaacactcaagaaaacgcaacaacaacacgcaacatgacacagctggtagacaatgacgaatgcattgacacccagatagattccgatgatgttaattttgcaactgtagtaccaagagcaagctcaataaccaagtgcgacttctgctttgttcatgctggcagcaaaggtgatgattacccaatgttatcaatgcagaaactcttagttgcaacgggtgctaccgtttgtgcactaattcctgcggatttgagcgataggattggcggggttaaatattacgaatacgtggatacttataggaagttcacaaccactgccagcgcccagcgtaaacaaggattaattaaactgttgctaaatgcagtactacctaaaaaacttttcgccgctcattgcaacaaacacaaaacggtggtggcacctttctttagcgcagaggcatgcgctgtcacacctattgaaacatacatacgtctagtcccgcagtggatatgccataatgaaacatgggatggaaggacctggggagttcatagcgccactttggaagtcataaacaaaattgtgtctcgccgtttcagcaaagtgccaacaaaagttttttattgtaacccaagctttatttgccctgcagagaacaatttgggattcccaatgcatgacgcagaatttgattacgacgccaacacgcgctcatttattgatttctctcgtcgttacgaacacaaaatcacagtcgtttctgcaggcagtatgctaccacctgaccctatttcatatttccaaacaatattcaacactttgagtgggcccatgtgctgggttactggtgaaatgtcataccactctttcgagttcacatatgccaacgcaacattcaattgcaacaaaaatttcatgagtggcaatgtgtttataataaatagcattaaatacaaactggtgctggatatattgcatgaagttcacacacacggcggtgcaggtactctatcaacattgttgatgtctaatgcaaaaatacatgtgcatcccgttgcgtttgaccagcaaaacaacaaacactacttggaaaacgttgatgtcacaaggggagatctgaccactgaatggaagtttttccatgaacgcactgttgcactgctagcacctgactcaaaaattaaccctactacactcagagttcaatcaaataaatttgaaatcaacactgctcaacaccagctcagtagcgacataatattatcagcacacaacataaaatccattcaactcaaccccaacaacgttgactcagattgcgtgttgaccgcaacacttcaatgcattgatgatgccatgtgggctagcaatgcagcaacactatacgagtgctacacaatgtctgatatatgcgatgttttgcactacttgatatcactaggtttaccatttcaactagcacaccgtggtgtatgttacgttagccctgggagggaaaaatcaagccaaataagcataaacgttgatgatttattgacacatgccagttcaatgtctgttgagttaggtgatgcactcaaatgtgtagtattgcaagaattcgattggtattggttcattcggtttagctgcatcacaaatgtcaacactaccatggcagagcttaacaaagctttaacaacaaacaacgcgaaagagcacagattcttttcagttgctaataggaagaagagcaaccctattctactgttggatgcgacaacagttcccggcgggttttacaccaatgacaagctggatcacaacaaaatgtacttgtgcctaacaaatgttgggtgtgtttacggcttagcatttaaggatagcattagtggtagctctagaaccctgatatacaccggttgcacatcgaaggcaaggtgtgtagcagtggcttgcacaaacaacatacaactgttcctatctgctgaaaggccaatacaagcgattgcatacggtaaagcagcattaaatcactcaacgttgaaacagttacgaaaatacggcatacacatgcaattagctgacccagaattcaccggggatctaatagtgtttaacactgaccacgatatcaatgaagacagccacgagttgagactattaaaaaacgcttcgacaatatctatgccacgacacacatatgacaacaaatttctcaagcaactaacacagacaaacaataagcttagacgatgcatagtgtcaggcaaacaaatggttgtgatgcatttgaagagtgaacacgaaccaaccatgcgcgcttgcagattgataaagggcataaaccttgacacaactcaacacaaagcctttgccgagtggtctgacaaagacaccatatcattcatgcaccgaactttctgtgacaaaaatggaaagatgactgggatttacaaccaacatagtgataaaccagcgccaacaaacttatccaccctccttgaatacttaggcttagttcacaactcatgggcctcggatgcactcaccgcctgggtgcaaaaataccacacacctgcccattcttgtatacttaggaattgtgaagaggttatcgatgcggtagatgctgatactatgctgtgcagaagttacataataaagggtagaacgatatttatagccaagaattttctgtgcttaacgataccaatatcgggcgcaggacacaacagtgtgatgaaaactaagatccatggcggtttgttaatgtcagctgaggattacatcatggtggagcgcaagcaattgagcgctttaacaaagagaacgtctaatgagtcaaaacaaataacttacaacgcaacggcaatgctgcccatgggagcaaatacaaatactatgactgtggatgagttatccactgagtacaactgtatattgataggatatacagaaaacttagattacgattgtgaagtgatacgcatagatgacttaccagatatgttatccatggaatattgggcgtacgatgacgtgataccacctatagtacatctacctacaaacaagaatttcacaataagctcaagggttcacccaaataggatgacaaaatctgattatatggtgatggaggcagccccaactttcgcaagaccaagcctaacaaagaccttcacgtcatcattcaacatgatgtcaaccagatatggaggttataaacaactgcaacgcaagccgctagacataaacatggagtatgaattatttaaagcaaattattataaacaagattatctgaatctgctgcagcattataaagagagaattgtaactgtgcagccttcagacgtattggcttggatcaaaaaacacaactatcccaatgctgctatattatccctagaacaacaaattaatgctggctgggaattaagtggaataaaccttgtcactgccagcggtaaagttgaacaaacaacaaaattgaccatattaacacgttggtttgatgatgttacaacgcgagcaattgtggcagcctcatatgctatatcagcgatattttctactttctttttgcaaatgaaagacagatttaaatcactgctaagcaggcaatatatatatgtagacggcatgacaccaattgagataagtgacaacatcaaatcagccggcgccttttgttacatagtagaagatgatttgagcaagcaagatagacaaaccagtgaggatatacttagcattgaatacaaaatatatttagacatgggggctgatcctgttacattgcagttctacatgacatgccacaaaaagtggcgctggaaaggtgttgggctgagtggctactggaacgcaatgcgcttaaccgggcaagtaacgactgcattgggtaacgccattgccaacctaatagtgcacaaccgatttgtggcgaggaacaaagacaaaattgcaatgatattgtttttgggcgatgacatagtaatgttgtgcaaacaattagtgaatgtaaatagacatggcacagaaacaaaaacactgtacaacatggagagcaagataagtataaacaagcacgctggcgggtttctatcaatgatagtttacaacattaacggcaacactggtataggaccatattacaggaggttgcgacacaggtactcagttgtgaactacacatataaacaagaggacgcacgtgacaaattggaagctaggaccctatcatattgcttcatgctaggaggagtaagtacatcaaggagcatagcacacacaataaatgcagatgtcattatacccaattggtatgatgttaatacttgcatagaggcaaactgtacatacgacagatcaagtgaaacaaccgttttaaaccacttgggtcagctcgtacacatgatgcatgaacgaaatgcatcgtacaagacaatcaagcaatggtcatataaacagtga

SEQ ID NO: 1250 - DNA, 11787 bp, Sclerotinia sclerotiorum endornavirus 11
  source 1..11787: mol_type = other DNA
atgaaccagaacaataaccttacaacagcaacaatgaccatggcaccaggctatcaaacaatcaacattgcaagccatccctcttcgggagttataggcatggcttgcacaactaacgaaactcccaaaaataacacaaccaccaccagtaatgataacaatgcaaagcttgctgacgctaacgtgtcgacacattttgctacggaagaagaagttaaagctaaactttccagtttggcgttttctgtggagaatggcaagatcatattagactcagatagtctaattagtggtgacccaagcattgagacagaaaatcattgttggactgccatcctcaagtgtattatgaaggttggggtaaattcaacagtatacagtgctatgcatagtctacgttacaaccaaccaatccatataagcataataaataaaatgccagctcttgcaatcatgtttgatacagaacatcgccgcagccttagtgatttgcgtgacctattcaagacactaataggcaaggattttaatattgatattttcaaatgtgatcgcttgtatctaaagaaaatagggcctggtaaagtacatttagaaatggtacgtgttgtgcctgttgggttcccagataataatcattatattactatatatgatttgttaacggcggatttaaatactctaagattaccgattgattttgattatttgtacaaggccgcagcagataaaaatgacctcgtcatgacccaaatctttgacatactcagaaatggagaacaaattttcagtgctatatctgaaaatgattccatgggtcataccaataagatattagaaaaattggcccatgacctacaagtcccagttgcagctattgaaacgggagaaattaatgcccaactaaaggagactcttgcccgtgttgccactttagcagtcaaaccaagagacactagagttgaacaattacccaatgattgctctgatgaaattgtagaccaacttattaaagatcatggatcatttaagttcgtacgtggcgtagctggatcgcacccccacccctatcacaacgcatcacggcacgccattacaagaactattattagtagatatccaaaatcggacgtcttatatgatatcggaggcaatttctattaccacgctcaaaatggtgattggcatgtgcatagtgtattcaagactgagaagcatgaagatgcctcaagatatcagacttatactaaatctttggtaaagtatgccacaaataaaatcagcaataaaaatatctctggatcacttaattctgtttcaaatagcatgctgacacaatgcttaacgaaaacaaataatctttggtgcaacaacagctgggatggctgcccgcatgggcccaattcatcagcatcctttgccatgtctattgacacactatttaatattgaaccggccgagctcctagctggttatattgaccataaagtcctaactgcaacacatgcactcacaataccagctgcttggcatagcgccgatagtggttcaatgaagttcggggaaggctattggcagaaaattggcggtcagcttattgttacattcccaggtgaatcattagtttataccaaccctatacggttaattgaactgtacatgaacaccccaatacttatgaacgacacacatgccatttattgtagagtcagtggttacactggaccccatttgattattgaacattttgtattgcctagaacgaaagtactgagcaaaatagtacagcactcactttggacaaacccagacatagatagcatctcagtagtagtgccccacattgatatatatgcacctgttagcttactacgtcgagaaccctttacacttgagcctatgatgcttaacatcaaattctatgaaaaactgcttaatcgactattactcccgcatacatgggaggctctcttgcaatatgcggcaggcttagtgggtaggacttatggttctgcatcaggctttaccacgcaatacaatttaacaaatagtgaagttaagcggcactgtttggtagcttattggtcaaacaataggggattagaaagtctaaaacctttaatcaagcggagtgaagaattggttcatcaaccaagtttcttgcaacaaatgtggtcatcacttaaaacattcttaatggaattgggccgagagtttgaccccacagataatgccatcttcaataaatttttaacagacaacagccaagataacatgcatgtatctctattgctggaccgcgccttcaaaacaatagataccgtatctgaaagcacacgcttacgcctgtcacataccatcacaaatggtcaggctatggaactccaggtgaatagtaagctgccagcaccagatgttgacacatggcgtgaggaacacacaactctcaatcatcttactgttaacaacctgcttaaaactatagaagaagtaaacaggagtgagaatataggctgtgttatctcagcacgatgtaagcataatcacaagatggcacatgtgcataaacacggtgatttcaacgttcaaaatattggtgaatgtgtctgctgtggggttatcagtacggttgattttacatcacattgctcactatgtgcagaacacgatctatgtcttggtaagagcatctcttgtaaacacgcacatacattcaagaatgatgaatgctgtggctataaaaattgtaattgcaagaaaactctaaaatgttcatgctgtggaatgccttccgaacaaatcagatgcaaaatatgtgggcctgaaacgcgcactatcattccacaaactgcaaaaaaagataatgatgacaccaactataatatcaatagtagtggtgtctcagaagatgcagaattttggaatgatgaggaccatgaagccaaaccaacagataccaaagagccaagtgatcaaaatcaacgtaatacaggagcaaacacaacgcaattcccgccattccaaccacaaagatcagctagcgtcccaaacttgaaaattttgcccactaactcaatgatgttggcgaatgtagaatattatcctagtaaagcagcccattatacctattattggcctaacaaggctgagcatggagtatcggaacattctaagcaccatgctaccgttgaatctttagcttcagattacaacagtgaaggatatgattcaggtaacagtgacaacgatagttacagagcggagagtgtagttactgatgctaatgtaactcaagacttgagcgcaagagctgagaataagattatggctaaggaaatgttatcagaattgcgtgatctgtatgttgatgatgaagcaccaattgatgcgttagggttcaagccaggtgaacgcatgtcaagtctatatacaccattgaccttttatccaggtgctaaagacagagaaccacgtagcacttatgtacccataaacctaagtcagcgtcaaaatgtggtcactgtttgggttgagagctatggtcaagctatcggtgatggcacatgtgctgctgatgcattagcccaagtgtcaagtcaagattacaagtatatctgcgaacttttacagctattaacagggaatactgaatggtggagtgatgtagaactggctattgcagcagctgctttaagaatcaacttatgtgttgcaacaccagcgggctcaatactatacattaatgacaccaacatgagcacctatgttagtatatgcacactagttcaagaaacaggtgactcacattgggtaccatgcacagcgctgatagatcaagtatatgccagagatgttaatcaaaagtacatgaacttcttatttttagcgacatattcaaccatgcgtgaaacaggaacagttgatgttaatgaaatacaaaaagctgttaatgagtgtcattctattggattacaagcagcaattaatgtgtctttccatatcgacaatgattggatgaacattttaaaaacttgtcctggagggatattcacacaagaaggctaccaacacacctcccaaccattcatttctcatgatattaatacttacatacataaagaaaatgatcttactattgtgtctgcaccgacaggatttgggaaaaccactaaggcagcaaaatttgggaagccacatgaaaaacacttagtgataagcccaaatagggtaactgttataaacgcagcatcctattgcactgatattctcaaaattacagcaagtgctagagccaacagccagtggtacccacttgacctaccactcaaattaataaacgactgtcaagttgtatatatgacagtagatagtctttacgcagttatcagcaatggtataactaatgactggaagcagctgttaagtggtaggaaaatatggttggacgaaatacatgacgttacgcccaactatatgtatgttgctaaacaattaggctcatatgtaactggagtcatgtcagccacaatccatggtaaaccagtaataacagagacaaaacacagtgtagtcacgacgttttgctcccaagaagtccttagtaacttatacgctgattacctagaacaaggacccacgcgggagcaagcatggattgtgccaaacgtggcgggcacatatgaactaccaactgagtcgatagtcaaatataatcaaagtgaaggcagatttgcaagtgtctcgtcaaagacagcaccagaagttaactggcaagttgttaacagtgttattgccaccaattgcattacaactggggcgaccatgccacacattaaacacattagtgatttagggatccgcattacatctcatttccactacccgccaataataggtatgaagaaagatgttaaaactatcaagttttacacatatagcaggtataattactctatgagtgacttgatgcagagcaggggccgggccggaagaacagatactggcacagctatcatggctctgccctcagatgagcaacaactgccaccacatgtaagtttgttgtatgccctcaagaaccagcttgcagtgcctacgtcggctaaacctctatgtgattcactcattaaattgccttttaatgaacaagcatttgatgcagagtttaatgaaaataaagataagatagactccaaaatacaacagtgggattcttatttgacctggaaagaagacctactagaatttaaaaaactgctgcaaactacaaaagttcattactctgacgtcacatatactaaggaggatatgcaaactatgctggtacagagcctcagcaataagcctattgtaactttacatggggctaaacacgacagagctcagcacaccatagcatccactaaaataagactgccaaagttagccaagtgtgtctgtggtgccacctcacttgtccataacccatcatgtggattgccatatatcacaaatgccactgagttagaatggttagatagagcttatagcaagtatgatggatctatgttcagccatgatgaaacaatcatagctattgataccagcccgagcagtgctaacatagatatccgattcaaattagcacaacaatatttcaacatatatagtaaaatgttgaacactatactcatcaatgcaaaaaatgcttcgcaaccatcgctacctatagggcctaaacatggagtgatatttacgtcagctaagaaaaataatgactatgcagttaaaaacatacagcaccccaataaagtacaaaataactcagtggttggcatattcgatagagataacagaactttaacattagcaagggttaataatggcatcataaatgtgaggctttcaggtgtgaatgctgtgattatcacaccaatattcacagctaactatgccttacttttagcttatgaatgcttgcagaaagagcttactcttagcaacacatctcaagtagctaaccaatcaatcattatatcaggacccgctggttcaggtaaaactaggctacttgccggccgctaccatacagaccccaaatctaaaatattggtaactaaacaacttgatgtacagtttgattataacatatcaccagtctcaccaaacaagcttttacagatgagacaagactatgaaacaatttatatagatgaaggtggtctcatgacagcaagtgattacattcttctagcttccaaatgtaaaaaaatggtaatatcaggtgatttagcccagaaggtggctgatgatgtagatcttgaaacaagtgtcagtctagataacacctggtttaccagtcaagtgcacaataaaatagaattgacagaaacgtatagatttggtaacgcaactagagaattcttagcaccaattgggtttaattatgtatgccacaacaccaaagataaaggcatatttatgaaacaatgtaattggtttaataagaaaacttttaatgataacctacttgagtttgacatacaactggttatcacgcactcaaatgccatggcatctaatatacgtgagttcctcggtcctaacagcccaataaagtgtatgactacaggaagagcgcaaggcagtcaggcatcgcgtactttatatgtggctgtaaataacccatctgttacatacactataccagaagtttacacagccttaaccagacataaagaacattgcgttatcttatgtgattccacggcattcaatactctcaaatctatgggtctttactcgcaccaggctgaacaacaaagcttaagatacgggtataaactcgatcagttattagatagctcttgtactaccatatcaagtgttgtgaacgtcaatctcatggctaacaataagattaccacggtctacaatgatgttaaagcaaccttaacaaatttatataaggacatgctgatgaagattgatgagtatattcttaggccacaagccaattacagcttaatgttacttaatgtaataatggactttaatggcataataagtagtgaccaagctgagaaagtttgccgtaatgagagtgactctgtcatatatcatgagatgtacaaaatcatagcacaggatggggttggctcagtgtgcaccattgacacatatacagaattatgtgaactactagcaactgtaactaaagaagggcaattgctgctagtagtgcagaacactatagattccatggggacaccaagactgttaacagccgtggttgacatacacaaaaaacgagtcttaattagagaccactaccatgcccatatggatcaagctaacgcagcaagcctgattgagttcataaatcaaggtgtttccataggtgcttgggacgaacaaatggtgcttgtaggtcatgaaaataccagctatttgcaggaatatttagacaaagcgaataaaatttttaaacgaagcaaacaatttcaagtttacaacaccatggtgcggtcgtgtgttaaactcttacaatcaatatccgacaccaaattcgtaggggttaaaagctttaaaattatttacaatatattacaacacaatgtattagaaagtaatgaggatattgagcaattaacaggatatgagttttttagagactatattaaaactatcgcaacagctagagcaacagtaaccctactaatgggattgctagatagatcaaacagctatgataatattagttcagtcttgccaaccttttactcagatacagtagtagaagagcgttacaatgtgaattcattgacccatatgctaaaacggcagtcccaacagcgtcatggggcaatagtcatagaccaatccctcattatcaatttaattaatgccttgatgcttgataaattaggactagatgttgtggcagccggcttaattggagctactgaatttactatcacaacagtgaatgattatctacaggcatcattaccagtacatgtgattgattattacctagaacaagctcgggataaaatccaggatagacaaattgctttaggtacacatgattacagccaagaagctggcaaatgggatggaatagccgcagctaacacaataaaagactatgtcactagtgtgtccaagataaacccatatgaagactggtcattctttaatgttaatattcctgaagccaaagctgataatcttagttcacgacacgggaaaatgacgacgcaactgataaatgaattattgaaatcagccaagaagataggtctcaatgataccagtctagccatactgtcagccctcaggtctgtgcttgagatgagcggattaaatggtactatgcaaaaattaatttatagtattatgaatttcttttcacaattgggtgcctcagccaagagattttttgaatttgacagtataatagaggatcaccaatataagatagaagaattacaagctgagaatgcaatacttcgcagggctatggaagagaaggaagatgatcaaccattttatgatgctcgtgattacacaatcaaattggatcataatggtgatgaccactccatcgatgatgtgcctgtcgtgagtactgggccctttgagcatgaaaaagcgaccctgcactctaaagcagtggatatgcaatatgcgagggaagactttaaaagagagcctcaggacaaagccagagaaaactcaggtttaactaaacacattaaaatgttaatggcaaacggcaaaatgaactatgctgagaatgccttcaatgtcaagggtcaatcaatttcgacaagcttaaagtatgaagaccgtcatgattacaaatctggcatgttgaaaacatggcaacaccatgagcattatagcactctaaaacatataggcataccagaagtatggatatcacaatttggcagtaatatctatatagcagtcgatgctgtcgccctaaaactagaatggcaaacaagtaatagttacaaactatgctggcatgatgagtcagcattagccaatgagtctatgttgtcatttgtccttaaaactttatcaacactaggtggcgctaaaggcccacaacaaaatactctcattaaaaccattgtcacaatcctgaagcagttacttcagtggtgtagtttaattaaagatgaaatggtatggaacaccaaatattactcaggagcaataccacgagaacagagaaattatcctgtgccggttgaagagatttggcggtacctgcaagacaacaccaagtttatgcgcatgttaaccattcgaaaaggagctaggtcaaggatggtgatggtaggtgaccgcttgcacattactaggcgggttaatgcgcctatattagattgccacacatttgctgtctgttccccaacgcaaacaggctgtcggatgaccgtctattcagccaccgattataggattaaactaatgtacaagacaatgggtttgaattctgttaatctagatgacatcgaagacttgagagcaggcaaggctgggcttgatgggttaaggcgattgggaatcaatattgacgcctcacacttagaaactgacgacttcaattcatggaagacaatattgcacaaagctctaaatgcaaaccctttaactgctctatttgacatgactcttgatgacgtttacacatcgtacaaaaaattagttgaacaagagaatgacttattagagttatcaaagaccatcaacaaatatgcatacagtataggcacaaatgtgggggtatgtataccatcagggcatggtaaaactaccaccgtgaacctcatgagaaagaaatatcataatttcaacataattgatgctgacgagtgtgtcacggacataacagtattacaaagctataattatgagcgcgtcatgcaaggatacgctagtgatattagtaaaaacttgcccaataacaacaaacctacaatcctgttctgtcatgatacacaatgcgtaccagataattacaaaacgatcattatattcaataaacagaccccgtatacaccagagcgactctggaaaagtgaaaatgaaggatcactcaagtctaagacgcatttataccccacatttcaccttaacttcgatgagattgaactcacagtattgcatatggcaatgaccagccgcgtaccaagtatcaaactctcagccaaaagtgagattattgaccccatgccgtcagaggaagcatatcaattttttactgacccgggagcagatctattgtattatatgccgcaggatggcaatgtagcgttcagagaccataatcatggcataagtcaacagcgcatatacaaacaaggaccgcatgtgggcttgtgtaggccagcagtgcaaatgttagccaatgccacctttaatgctgtctcaacaagggttaaaggagttcaaaagttacgaactaatgattttaatgataaggaatatttagccaagatgtcacattggttcaaaccaggatgggaaaacaaattaaaagagtaccaagaggaagtcatcacaccttcagtgaacgctgcattagaatgggctatcaataaaggccataaggttgaactcatgcgtgatatggtggagtcagtaatggattatgaacaagcagtagaatatacgaatgtacaagcgcacttcaagactgaaaatttactaaaagaaaatgttggggagctagaacatcaaatcggccgcattataatatggcataaccaaaacttaaatatgattatgtgcccgatgataaatgagtgcaagaagagattagttcttttatttgatgaaaggaaaattacatattctgatgggatggatatggtccaattaaacagtttgttaagcaaaataaaaccaactaaatacctggttgaattagatctaagtaaacaagaccgtcaaacagataaacaaattttacactatgaacattggatgttggagaaactcggccttgatggacgagtttgtagctacatgaactcattgcttggtggtttctctatcaaaactcctgatggtgttaacaccaaaacaccagccatacatatgtctggaggagctatgacgtctttaggcaatgaaatgcgcaacttattgctgctatctgatatatgccagaataaagaaatcaaccatgtcttcaccctaggagatgatagcctaatcatgaccaatgacgaatttgatggtaaatatgttggcctagtggcagcaagcaaccacaatgtcagttgcactttcaatcaatcaacaactagtggggtatttttacaattaataattgcagaagtcaatggtaagtatgtagcaacacacaatttcaaaaggttaagggaaaaactagcttactccccttatgggtcacatacagatgaatacaagtcgaaagtggcatcatacttactgatggtgggtgaatcaccgtacacagtgacacgtatgcagcaacttgggtttgactcctttgtacctatgggaacaacatttgaagaaagactccaagctaacgccatacatcataacacagatggggccgagattgtgaacaccatcaatgatttagtagtgttatcatatggcaaacaccaagagattttaacaatacaaggtgttggagttatacggtacaaacatcttaaagctggtttccatgcagctggagagagggtatcagatcaaacattgttagctaaatttcagcacgcaatgcaacagtacaatgagaataattaa

SEQ ID NO: 1251 - DNA, 10476 bp, Sclerotinia sclerotiorum endornavirus 1-WX
  source 1..10476: mol_type = other DNA
atgtctcaatcaattactcacacaactattactactaaaacaataaccgatgcacaaacaaatacacataagagggcttttgggtccctcttaaaagattacccaaacaaaaaccatcaacgtggtacaacgtggtttgacgttgttgatccacctcaacagcaaaaatattggcccaaacttacgcctaaccctagatggaaaaaattatctacatcaaaagatgctattggcaaagttgagcttggtggtgagactcaagttatggcaagttacaattgttggcaatgcatttttggttatgatttaggcattaacactgccatatctcttgaaatgattaaaatgaccataatgtgtcaaccagaagatgcagcacatattcaaatccaggctagttacgccaacggcatgctgcacattgcaaacccccctggactgccgacaggggagatgacacctgaactattctctgctcaaaggaaatttgttgaacacccaatagaaggatgtattaaattaattgaccttgttgatttatacgacgaaggtactatggtcggttttactcctcgtactattacagagaagttggctaatgatataggtgttgatgttagctctgttgatacacaacaactcaaaaaagcaatatctgattctgttaatagccgtggcacaagagctgtcactaaattcactgaccaggcaatcatattgccaacaagttgccctgaagagattgttaatgatctgaataatgagttcggaaatgcaacatttattcgtggcaacaaagaacatcacccgcatatttaccacaatgccagtcgcaaagctgtcacaaacttattgtgtggttggcatggcagggacgctctaatatatgatattggtggcaacccagctagccatcttaacgcaggccggtttactgtacatagcgtttatagcaaaaaccaagctgcagacaatgcacgacacatcaaatggtcaaagcagtgtgtggcatgggcacgtcgcaatatgaacaacgatagcaaccattcagtggttaatggtgtagcaaattcaatattaatgccaaatagtgccctatggtgctcagatggaataaataagtgtgtccactctagcaaacatggatcttttggtatttctattgacaccttattccatttaccagttaacgatctatttgatttttatatgagaaataagatttttcatactgtgcatgcgatcactttaccgaacaattactcatatgcaagaagtggtgcgcttaagtacaatgaaggccattggtataaaaaaggtgatgattggacaattgaatttaatggagaaagtttagcatatagccaaagtattgccctcactgatacttatttatctgtgcctttacataacattggtgagatggttgtttattgcaaggtgtcaggttataagggtgctcatctaataatagaacactatttaattgatcgagcacaactcgatcaattgtatttaaagcatgttatgtggtttaatactaatatggacgaattatttgtaatggtgccacgtattaatatggatcaatcaaccacagtcatgggcagaattccatacactatggagcaagtagttattaacgttcgattctatgaacgtcttttaaacagattgatgcagtcatacacttgggatagtgttttgtcctatgctgctggtcttataggtcgtgtttatgcaacatcaagtggtttacatatgaagtggaatttaactaattcacaggtgcgtgatcattgcttgatcgcctactggactactaatcgtatcaatgaatcgatcaagccactgcttgcccaggcagaacgtgcatcccgagatcctgatttcttaactagcttatggaattcactcaaaaactggctaaaagattttggctctcaatttgaccccactggcaacaccacagtccaaaaatttatagctgataataaaggtgacacccttaggcttattcaaatgttcaatagtaccgtacgtagtgttgaatcacttaatgtagcaacacagatggtacactcaagaagtgtcgtagactgggttgcatcctccactggagttagctacaggcgtctagatgttgatattgacacttggcgaatgaaacaagatatgagtggcaataaaatgacagtttatgatcatattgaatttaaagatgcaaagccagcaggggttaatattggttgtttaaccacaaagacatgcccacatgaccacaaaccattccatctacatttatctgatctaaatagacgtatgggtaactgtgcatgttgtggtgtgatcagtaatctgaacataacaaagctatgtaccatttgttccgatatactaccttgccacggaaaaaacttacgatgcacccacacccatgaacaattaaatgacgaatgttgttcattggctaagtgtacttgcagaaaggacaaacattgctcatgctgtggtttaccatctgttaatatgtactgtaaagtatgccaatttttacctgacaaatcggtgaaaccacagccaactacaacggttgatgacaataacatcaccatcgcacctgtcattgtaaaaccaacaaccgccaaaaaagaggcacctgtacgtttcacattcgaaaaaccacaggctaccagcacaaatgatgatgtgaaggacaacacaacaatcaatcatccactttctactaataataatttcaaatttgatgccttaaaagaacaggaagtggataaaattattacatatgatgatgaaaccactattaaagaagataataaggaaatacatagtattgatgctgaatcagttggtacagttgataccaatattgatgctggccgatctattaataacgacgttggaccattattacctgaagaagatgttgctggcattgatcaaatcaatacgctaatgagagcagttgttaatgttgaggatgttaatccagggcatgctgatactatactaacaaggctgccaccacactatcaaggaggtctggcagttcgcgttgttggatacaccgacgtgccgggtgatggcacatgtggtgcccacgccctaagtgttgctcttggattgaatgtagatgatgtaaaacattggttaaccattgcaactggccatgatgactggcataattctgaggagttagctgcctgtgctttagcatatggccgaaatttaatttgtgttgatattggtgacaccactatatatagaggtggtgaccaagactatgctggttctatcatacatggcactgtcgtcggttgtggtgcacactggttggcaggaaattgtaatatccttagttactcttcactcttcactaataagttaataactgactacaccaatctgctacgtgcagctcatctcgccttaaatggcaatgaccaaacagccctggcatactcacacagtgactttgatattgatagcatcatagatatgggtggtaacatcgtcattagccatgatggaatctctatacaacatgaaggtggcaattcaaggtgtcaaatatctgataagtcagatagtatgaagatgattgttggaccaactggatcaggtaaaactacaacagcattccaacacattgaaggtaaagtactattgattacaccactgcgttcagcagtaaataatagctttgattatctacgcaataaagtgaaagtggttgctcgagctcaaggcgcttggatacctgataatattgacatgaaagatataaataaatcagacctagtaataatgactatggagacattatattcaggtatatttattggacatgacaagaagaatatttatcatcaattagtgtcagcacgtgccatcatatgtgatgaagttcatgagattagccctcactatgccagattattgactgttctaccaaaaaacaagacatacgtttgctcagctactatgcctggtatcaagctagattataactgtaaatttgatgtgacaacaaattttgtccagggtgatactattgactattggtttaatgaagttaaatctaataaagcaatgccacccaatacttgttatatagttggaacaaagaatgaatgtacatttgctgagatgccagcagatattaaagccatcaattcatctacgattaacaatatatctatcaatgatgttggcaaatgcatagctactaatattgtgacaacaagtataaccatgccgcaagttacaaatattattgatttaggagttagaataacaagtgatgttataatcaaaccatatctaactgacgttgagaaaaacatcagatttttcaactatagtaaacgattatatagttgggcagagatgactcaagctagaggcagagttggtcgtgtctccaatggtatgttctatggaccatgccctgacaagacaacgcgccaatcaaatattgatgcattattgaatagttgttatacacgtgttccatgttacagtggtttactacatgaatggcaaatggttaatcagaagaattatgatgaagtagtcaattacttcaccacacttggcaatacatttgataacaaacccacttggtggcaagagtttcaatcatggcaggattcagttgcagagctattgcagtgtaagaattccaatcaacaaccagtatttgttgatgagtacataaacaaagaggatatcttggctttaatacctaactacattggcactaacccaatttcaacaagtttgaaacatgctaaacatagagttggcgctttacgttatagttgcactattgattgggataatgtgctacctaagcacttatatgaggcaacagataatattgattttgaaagcttggtgatatctgttcctgatagctcacaatttcttaatatagaaactgattcaaatgaagatatagcatcaaaactacggttactggctattgctagtatactaaatgctatcaaagggttaatggcacgtggtcagatttacattaacacgaacaaatggagtgatcagcatggccaatatatattatatgatagtttggaagatgcacaagcactatcaggcattaacttatctgaatatgacattattgggctagttgatattaaaaaatcaagcatgcgtattacacattaccagcaatctaataagtgggtaggtcatgttattgtaccaacatacaaaacacaccattatatgggccaattgactgatataggtctaattcgcgatcgccaagcaccattggttgacacacttcgcaactcaacgttatatgtgggaccacctgggagtggcaaaacaaccatgatgattagtgagaataaatcatcatacaccacgactatcagctctggacaactaaagaaccatggtacatggttgcccccatcgttgatacctcatagtcaagaaaatattaatattgatgaagttgggttgttagatgtttccgtcatattgtctcttgcaagtcgatctaacaaattaactggtactggtgatatcagtcaggttgtgcatacagctaatgagacaaatgcctattatactgggtttgatagtggcattgacctgttttcaaagtatgcaaacaagatatatcttgacaaaacccaccgttttggtccacaaacatgtaatttagtcgccaaattagggtttgaaattaatcctactaatatggataaggtcgaagagattaaaggttatgtgtgcgcaataaatgataacaaatcatatagtaaagtattaattgcttctgaaccggatgcaataatctgtgctactaaccatctagcaagaatgttcaggaaaattacacaaatcccagtatataatattgctaaatgtcaaggtattgacacaccaaatacattagttgttttacagggcgggcaaattgatatgctagccaacaatcagttgtatgtagctctaactagacatagccaatgtgtctctatagtcgttgacccacctcatgcagcactattaatgcaattatgtatcaaaacagagaatatgatatcatataccgatgcgcttggtggtgcaagcaatattacacaaccgattcttaaccatattatagagtcgaacaagaataatctactgaaagatgctcaagtgatgaattatttaacaactatctgtgctttgcagtctggaaagattacacccaacacaatgattgtgatcatggatcagatgaatttccattacaagaattgcccatttaggtttgttagattaaaagaaattaaagatattaaacaattagaatgtgttgttagcatatatggcatccagtgcgtggtgtatgacgtttccctaactaatgaacgtgaattgctcagttgtttactgagccaagtaacaacaaataaacatatcaaagaatatctacgtaatctaccaaggaaatttataacaacaggaaagaaaattggttacaacttatatctctggcttagtaaatttatgaaagataatattactatacttagtggttacttcaatactaatgaggatattaacattggtggcagtactgacctgagtcacataatttggctagcgatcaatggtgtccatagtgcatttatgacattagtgcacatattagatgatgtcgggagtaagttgtccaagtatacggatggaagttatgcagctgaacaattcaaagaactgttaatcgaaacatggaaaaagagcaatccatttagcttcggtgatctgaagataagtaatagcctcatgtcactttacaaattattccgagaccacctcagcaaaggtgttaacacattatgggatttcataaaatatgttgttagtacactgcgtgaatggtggcataaacaattcaatgtcgataaaccaacatattatgaacttgaaggcaccagcatgtctttgatagccactgactcaccatgtattaatataatgaggaatagtttggatggtgatcattcgctaattgatggttctcctacaattcccaatacacaatatattacacaactagacaatttaattgacaattcaataataggttgggagaagaaagctactccttctccaacatgtgaagactgtcctgatgatgtacaggatgtcttagatgagattgaagttttatttgattatgaagaagaaactattaatcataacccaacagttagtagtgagcaccttgaacctagtatagatgaatttggccaaatgccgagattaagctccagtgagcctgtagaaattaaagataatatgtcctcagttggtatagagcatccagagccaacattagacaaatcaactcagatagtagaaaataatccaattgaactagataaggggattaatgaaagtaagcaaaaccaatgcttatgcatggaaacatgtagtgactggcagttagctgataacatagtcactaacctcgatttgaatacttataaaccaaacttaatgggtaggatggttatagagaagataccgggtggtatcaaaataaacttaaagttaccaggtgttggtaaattcaatgctgtcactaaaaaatgctgtggagataatacacatttgatctatgtgactgtcaatggagagcagataacactcaagatcgataaaacagcttcaggttatgcattatactgcatgccggatgtagttgatgtcaatttttctcagctagaacaagccataaaaatgttaagtaaactaggtggtggcaaactcaataatggcatgactttgttagttgattcacttaagatcacccgcaaatttattaaaaaattgattagattgacgcattataaattgaaatacttaatgggtagaatcaatttgcgccatcttacaagtaataggtcaaacttagaagtctatcgtacaatatgtcataggttgcctacctcatatagtaacagtaaattcagtacacgtgagtgtattggtggtacagtattgtcaactatagagctagtaccgaataatgctgccaatcgcagtgaaattttcatagcaatatacaatgtgaatggtgatacacaaatactcatttttacaaatgataataattattcaaattatatcacacgtcgcctaatgaccccaattgaacatggcgatttcgctggtgacagatcagcaattagtgcattgctcagactaggtattgacatcaaatcaattatgacacaagataacgatctaaccattaatgacattaagaagtggctactagctaatccactcacatcaatgtttgatgtcactgaccaacggacttacaataatgccaaagaacactcaattgttgagaaacatttatttactgacatccataatatattggataagccattagacattaagtatgcattttgtatacccagtggccatggtaaaacaacaacagttaatagaatacggagaagcaaccaagagttcacagtccttgatgttgatgaagtacaagaacaagcaacaatattgcacttagggtttgaggataaaatgttaaattataaaggaaaattagaaaagtacatcgcgaatagtacaaaaccaccagatgcagtattcatacattcgcctatctgtgcacctgctggttacaaagtcataataatcataaatgatggtgctgatgtcccattggatagaatttggtctggtaaaaacgtcaaccatcttgagagtatgaataatataatccacacccgaaattatgatgatgtatataatgtaactattaactacttaaacaaaaaattaactggtgatatcactttagaggatggaactacaattgttgataatattgatagtatacttggagattcatttatgaggaacaatcctggatatgatgatatctatagattaccaaccggaaaagaagatatcttaaatatgagcacagggaatattggtttaggtgaacaaagattttttaaaacgggaccacatccagaagtgatgcgtccaacagttaataaaataccctctgctttaccgaatgctattatgactagattgatgggtcgtgtgaaatatagaacagttgaccttggtatcaaggattaccacaaattaatgactaaattcttcattagtggttatgaatctaaacttgctagttatacagatgacccaattaatttgaattatgaagatatactcacctggttagtagccaaaggtaataaaatacaactgttagacaatatgttacgatctgttaaagatgatgagtttgctactgatccagctaacattaatgtgcattataaagttgagaatttaatgaaagagcaggtcaatgatatacttgatcaagttggtagagttattgtatggaataatcaaaatattaatatgtatgcatgcccagtcattaatgaagccaaagcacgtttcaaatcattattaaaacccaatgttatttacactgacggtatgacagttgctgatatgaataaaagtattggtcagtatagaagcagatggttgcttgagatggatttatcaaaacaagatagacaaacagatgcacaaatattaatttatgagtggaagttgatgggtatgttaggtgtacctgatatattgattgagttcatgacctcatttataccaacgttccgaatcaatggcacaagtcatgagaccgccaaactaccagctatacattttagtggtggtgccatgactagtatgggcaatgaaatacgcaatctattgttactatcagactgtattggtgaaaattatgtggcaatatacactctgggtgatgatagtcttgttttaatgaatacaaaacctgatttagagttgtataaacgcatttgtgcaagccgacataatgtacaaaacacagcagttgctagcacaaaatgtgcactgttcttacaaatgatagttgcgcgaaatgaagatggaacatactatttaagtcataattttgtgcgtttaaaggaaaaattagtgtattcaacgtacccgaataccagctctgattggaaaatgaaatatgcatcatacttaatgatggttgggtattcaacacaaaccaagaaagcaatggaatacagtgggtttgtgtctttcccaagtctaggaacaacaatgtcacaaagagttgcagctaatgctttatataatgaaataaatgatatacaagtgtttaatataataaatgatataattaatgccaagcagcaagtctcggaagagataattatacaactacccgtaataatgactggtaataaactaaagtcaggtatgaccagggttggtaaatatgttgacaatcataataaaatgcatgaactgttaatgcaatatatggaagagcatactgatatttag

SEQ ID NO: 1252 - DNA, 7411 bp, Sclerotinia sclerotiorum endornavirus 2-A
  source 1..7411: mol_type = other DNA
taataatgatgatatccaacctagtagtaatgacattggcccacttctacctgaagaggaggttgctggcaccgagcaacttagcacattaatgagggcaattgttagtgttgaggatgttaaccctggacatgctgacacaatattaacaagactaccaccacattatcaaggaggtgtagccgttcgcgttgttggttacactgatgtgccaggtgacggcacgtgtggagcacatgctttaagtgtagcacttggacttaatgtggatgatgtgaaacattggttaactgtcgcaactggtcacgacgattggcataattctgaagaattagccgcttgtgctctagcatatggccgtaatttaatctgtgttgatgttggcgataccactatttatagaggtggtgatcaagattatgctggctctatcatacatggtactgtggttggttgtggtgcgcattggttagccggtaactgcaacattctcagttattcctcgctcttcacaaacaaattgatgactgattacaccaatctactaagagcagctcatcttaccctgaatggtagtgatcaaactgcactagcttactcacatagtgacttagacattgacagtattatagacatgaatggtagtattgttataagcaatgaagggatctccatagaacataaaggtggcaattcaagatgccaaatatctgataagtctgataatgtcaaactgattgttggaccaacaggatctggtaaaactactaccgctttccaacatatcgaaggtaaagtactactaatcacaccgcttcgttcagctgtaaccaatagttacaattatttaattgacaaagttaaagtggttgcccgcgcccaaggagtatggatacctgacaatataaatacaaaagatatcaacaaatctgaccttgtaataatgacaatggaaacactatattcaggtatattcattggccaggatggtaaaaatatttatcatcaactagtatcagcacgtgctatcatttgtgatgaagtacatgagatcagtcctcattatgctaggctactgactgttctaccaaagaacaaaacatatatttgttcagccactatgcctggcattaaactaaattacaattgtaaatttgacgtgggggggatagttggaacaaagagtgagtgcacatttgctgaaatgccaactgatattaaagcaattaattcaactactatcaataatgttgatattaacaaagttgacaaatgtattgcgactaatattgtgacaacaagtatcactatgccacaagtagcaaacattattgacttgggggttagaattaccagtgacgttatcatcaagccgtatttaaccgatgttgagaaaaatattagatttttcaattacagcaaacgcttgtatagttgggcggagatgactcaggcaaggggtagagttggccgtgtctccaatgggcaattttatggtccatgtcctgacaaaacaacgcgccaatcaaatattgatgcgattttgaacagttgttatacgcgtgctccatgctatagtggtttgctgcatgaatggcaaatggtcacccagaaaagctatgatgagacggttagttacttcaacaagctcggcaactcatttgatactaaaccaatttggtgggatgaattccaatcatggcaaaattcggttgcagagctattgcagtgcaaaaattccaatttacaaccagtattcgttgatgagtatatagataaagaagatattttggcattaatacctaattacattggaacaaacccaatatcaacgagtataaaacacactaaacacagagttggtgcattacgttatagttgtgcagttgattgggataatgttttacctaaacatctatatgaagcaaccgataatattgacttcgaaagcttagtaatatcagttcctgatagctcacaatttctcaatattgaaacagattcaaatgaagatatagcatccaaattacggctcttagctatagcaagtatattaaatgctatcaaagggttaatggcacgtggacaaatttatatcaatactaacaaatggagcgatcaacatggccagtacatattatatgatagtatagaggatgctcaagcattatcgggcatcaatttatcagagtatgatataattggattagttgatattaaaaaatcaagtatgcgcattacgcattaccaacaatcaaataagtggacaggtcatgtcatagtaccaacgtacaagacacaccattatatgggccaattaacagatattggtttaatacgtgatcgccaagcaccattagttgacacattgcgtaactcaacattgtatgtggggccaccaggaagtggtaagacaactatgatgattgatgaaaataaatcttcatataccacaacaattagctctggacagttgaaaaatcatgggacatggttacccccatcattaataccacatagccaagaaaatattaacattgacgaggttgggttattagatgtctcagttatactatcacttgctagccgatcaaacaggttaactggcacaggtgacatcagtcaagttgtgcatattgctaatgaaactaatgcatactatactggttttgacagtggaattgaattgttctcaaagtatgccaataaaatttacttagacaaaacccatcgttttggaccactgacctgcaacttagttgcaaaattagggtttgaaattaatcccgtcgatactaataaaattgaagaaatcaaaggttacatttgtgcgacaaatgataacaaatcgtacagtaaagtgctgattgcttctgagcctgatgcaataatttgtgccactaatcacttagcgagaatgtttaggagaatcacacaaatccctgtatataacattgctaaatgtcagggcattgacacaccaaacacattagttgtactgcaaggtggacaaattgatatgttggccaacaatcagttatatgttgctttaactagacatagccaatgcctttccataattgttgatccaccgcacgcagctctattaactcagctatgtgtcaaaacagaaaatatgatatcatacgccgacgcactaggtggtgcaagtagtattacacaaccaattcttaattatattgttgaatccaatagagataatttactgaatgatgctcaagtaatgaattacttaacgacaatctgtgcgttacaatcaggggaaatcacacccaatactttaattgtgatcatggatcaaatgaatctgcattataagaattgtccattcaaatttattagattacgagagattaaagatattaaacagttggagtgcattgttagcatatacggtttccagtgcgcggtgtataacgtctctttgactggagaacgggaattacttagttgcttattgagccaagtgacgacaaacaaacatattaaagagtatcttaagagtttaccaagtaagtttatgacaacaggaaagaaaatatgttataacttgtacctttggctcagtaagtttatgaaagacaatgccgctatactaagcaactacattaatactaatgaggttattgatattggtggcggacttgacttgagccatatattatggttggctatgaacggtgttcgcagtgcatttatgacactggtacacatactagatgatgttggaagcaaattatccagatatacagatgggagttatgctgctgaacaatttaaagagctgctaattgatacatggaagaaaagcaatccactgagtttgggtgatttggaaattagcaacagtcttatttcactctataagttgtttcgtgatcatctcaggaatggcatcaatacattatgggacttcgtccaatacatagtgagtgccatacgaaattggtggcaaaaccaatttaatgtaaataaaccaacatactatgaacttgaaggcactagtatgtcattaattgctaccgattcgccatgcattagcatgatgagaaatagcttggatggtgatcattcgctgattgatggctctcctatattcactaacacacaatacatttcacccctggatagcttggttgataattctacaacaggttgggagaagaaggccatcccttcaccaacatgtgaagattgtgtagatgatactcaggaagtattagatgaaattgacgtactgtttgattatgatgatgaaaccagcaatgaacataactcgttcgccaatagtacgagttccaaaccagccatagatgaaccacatcacataaaagaatccaaccccagtgagttagaagataaaaaagataacaagcgagataaatgcctatgtatggaagcatgtgatgattggcaattagctgacaatatagttactagccttgatttaaacacttataagcccaatttaatgggtaggatggtaattgagaagatgtctgatgggattaaaataaatttgaaattgccaggtgttggaaaattcaatgctgttaccaagaaatgctgtggtgataatactcatctaatatatgtgacagttaatggtgagcaattgacattgaaaattgaaaaaacagtttctggctatgcattatattgtatgcctaatgttgttgatgttaacttttcacagcttgaacaagctattaaaatgcttagtaaattaggaggtggcaaactcaataatggtatgactttattggttgattcactcaagattacccggaaattcatcaagaaactaattaggttaacacactataaattaaggtatttaatgggtacaatcaacttgcgccatctcacgagtaacaggtcaaatttagaagtttaccgtacaatatgccatagattgccgacttcatatagcaacagcaaattcagcacacgtgagtgtattggtggcacagttctgtcaactattgaattaattccaaataatgctgctaaccgaagtgaaattttcattgctatatacaatgtaagtggcgacacacagatactcatttttaccaatgataataactattctaattatatcacacgacgcttgatgactccagttgaacatggtaactttgctggtgatagatcagcaatcagtacactgctcagattgggtattgatattaagtcaattatgacgcaggataatgatctaaccattaatgatatcaaaaaatggttgctagccaacccattgacatcaatgtttgatgttactgatcaacggacttacaataacgcaaaagagcattcaattgttgaaaaacatttgttctcggatatccataatgtgttagataaaccgttagacatcaagtatgcattctgcatacctagtggtcacggtaaaacaacaacagttaatagaatacgaagaagtaatcaagaatacacagttctagatattgatgaagtacaagaacaagcaacgatattgcacttagattttgaagctaaaatgttaaattataaagcaaaattggagaaatacattatcaatagcacaaaaccacctgatgcggtattcatacactcacctatttgcgcgcctgctggttataaagttatagtaattctaaacgatggtgcagatgttccgatggatcgaatctggtcagataaaaacgtctgccatcttgaaagtatgaacaatatcatacacactcaaaattatgatgatgtatacaacgtaacaataaactatttaaacaaaaaactaactggtgacatcactttagagaatggaactacaattgtagataacatagatagtatactgggagatgcattcatgaggaataatcctgggtatgatgatatctatagactaccaactggaaaacaagatgttctaaatatgaatacaggaaacattggtcttggagaacaacggtttttcaaaactggaccacacccagaagtaatgcgtccaacagttaataaaataccttcagctttaccaaatgcaattatgaccaggctgatgggtcgtgtaaagtataggacggttgacttagccattaaggattaccataaattaatgactaaattctttattaaaggttatgaaacaaagcttgctagttacactgatgatccaatcaatttgaattatgaagacatactcaactggctaattgctaaaggtaataagatacaattattagataacatgttacgatctgtcaaagatgatgagtttgccactgatccagcaaatataaatgtacattataaggttgaaaacctaatgaaggaacaagttaatgatatacttgatcaagttggcagagtgattgtatggaataatcaaaacattaatatgtatgcttgccctgtcataaatgaagccaaagcacggtttaagtcgttattaaagccaaatgtcatttatactgatggcatgacagtcgctgatatgaataagagtattggccagtataaaagcaagtggttacttgaaatggacttatcaaagcaagataggcaaaccgatgcacaaatattgatatatgagtgggaattaatgggtatgttaggtgtaccaaatatattaatagaatttatgacatcatttatcccaacattccgaatcaatggcactagccatgaaacagcaaaattaccagctattcattttagtggtggtgccatgactagtatgggcaatgaaatacgtaatctattattactatctgactgcattggtagtaattacgtggcaatatatacattgggtgatgatagtcttgttctaatgaatatgaagcctgatctggagttatataaacgcatttgtgctagccgacataatgtagcaaacacagctgtcgccagcacagagtgtgctttgttcttacagatgatagttgcccgaaatgaagatgggacatactatttaagtcataattttgtgcgtcttaaagaaaaattggtatactcaacgtacccaaacactagctctgattggaaaatgaagtacgcatcatacttaatgatgataggatattcaacccaaaccaaaatagctatggagtacagtggatttgtatcatttccaagcctgggaacaacaatgtcacaaagagttgcagcaaatgccttatataacaaaattagtgatattcaagtgtttaatataatcaatgatataattaacgctaaacaacaggtatcagaggaaataattatacaattacctgtaattatgactggcaacaaactaaagtctggtatgagcaaagttggtaagtatgttgacaaccataataagatgcatgaactgttaatgcaatatatggaagagcatactgacacttag

SEQ ID NO: 1253 - DNA, 12555 bp, Sclerotinia sclerotiorum endornavirus 3
  source 1..12555: mol_type = other DNA
atggggatatatattaaatcaaccattactaccatgtctaactacaccaaacccaacattaacaccatggaccaatcaccacgaaaaaaaataacaaacattattgattctgttgctctcggggctaacaacagaattatgactctcgaaaaagcctcgaataacaaacaaaaacaaacaaagacacaggaaactgataaaacagacatcagctcatttggtactagatctttaacccataccattgaccattcggcatcaccaccttcctaccttagtgatgatggcagtagcagtgttaaccataaccgctacaaagggccattggccaccttagcaacaggtgaaacacggccacatgaccgcgtggagcgaaaggcagcgacggatttcactgacattgagttatattcgggtaactctgataagttaaatgcactacagatacaaatccctagcgacaagagcgagtttaatgaagctcctaccacatttactgagatgggtttcccaaaacatgacatcccagaaccttggtacgtcaagatgttatctacattccgctctagtgacacgaatgctggccattacaagtcattacatggggtatcgcctgcaagtcaaactgttactccatggaagcgaacagacgtgccaaaaccgattgaagatgttctcgataacagtagaacccctgatacgcccacccttagttcggcacgaaagtcatgcttgtgggtagccatgcatacccttaatccgaggggcatggaacagatacctatcaacataagcaatctaaagtacctcgactaccaaaaatacaaagtctggcgagcaggtgtgacaaagggctggttagctatcgaaataagacgtgatcactccaaaaatcatttacattgcctttccggcaactacgaggaacaattgttatcaggtgatggtaaattgactggtgttatccattggacaaagatgttcactgagattaacaatgaatctcagctatcctggggccaactaaattggagcaaccctgatgcgggtttggttggtgcgaaggctacagtgctcgaaaagctagcgcatgatctaaatgtgcctctaagtatgcttgatagcggtgcagtacgagcacaactagcatctactattgcttccatgtccgatatagcagtaaaaccacgtgacacaagagtagaacaattacctaacgacacgagtgacttggttatcgaccagttaagccgcgactatggtaattttaagtttattcggggctcaagtggtagccatccacacccttaccacaacgctgctcggcatgtcattacgcggtacattgtttcacttttccctaaatcagatctgttgtatgacattggtggtaacatgttgtatcacgtacaaaatggtgattggcatgtgcactctgtattcaaagctgaatcttacgaagataagtctcgatacttaacttacactacggctgtcgttaaacacattagcgtgagaaaatcacagaccaacatcaccggggcgaccaactcgatcacccaaagcatgttgtcaaaggtgttaacagctgacaataaactgtggtgtaacagtgcgtggggtgattgccaacacgggactaaaaaccatgccactttcgccatgtctgtagatacgctttttaatattgagccatctgagctgttaaaaggttatattgcacacaaagtaattatggcaaaacatgccctgactgtgcccaaggcgtggcatatggctgactctggaacgctcatgttcgatgaaggttactggtcaaagtcagatggcaatctaaacgtggtgttcccgggtgagtcaatgacctaccagaatagtattagtttaattgatacatacacaaagcgcccattaattatgggagatagccatgccgtttactgtagagtgaatggatataaaggaccacatctgatgatagaccatttcgtgctaccacgtactcttgtcatcgaacaatttatgaaacataccatctggtcaaatcctgacacaaacaccattgtagttgtagtgccagtcattgacatacatgcaccagtcactttattaaaacaacagccatttaccatggaagcaatggtattgaatatacccttttatgaaaaattgatgaataggctgttgcaaccacacacgtgggaaggacttacccaatacgcggctggcttagttggccgtacttacggatcagccagtggtttcacgcgtcaatttgacatcactaacagggatgttaagaatcattgtttagtagcatattggtcaaacaaccgttcgcttgaatcgattcgtccattggttaagcgagctgaggttgacgtacatcagccatcattcttacaacaactttggtcatcacttaaaactttcttaactgagttggggcgtgaatttgaccccacggagaccgacttcattaaaaaactggtcagtgacaattcagaagactcaatgcatcttggcctattactagacagtgcattcaaagccatagacagtgttaatgccagtactaggttagatgtatctcattacataactaacggcatgatgtacgagacaggagttacagctacaactaagtgtgtagacattgacacttggcgtcaaaaccacgttgaggtgtcacacagcacagtgtacactttgattactggcaaggatgatatagcacctgtcacaattgtgtcatgtaaagctgctgctgcatgtcagcataatcataatgtagcccatgagcacgtagttggcaactcaatcgatcaacgtgtagggatgtgcaactgctgtggtatacttagcactctaactgaccaaaatctgtgtgcactgtgtgggagcactcgattgtgccatggcaaaagccatctgtgcaagcatgagcacacggtacttaatgatgagtgttgtggcaagccagcatgtgcctgcaagaagaactataaatgttcatgttgccaaatgccaagctccttgccagtatgtgaaatgtgccgcaacgccccgccagccaaaactgccgtgtgggacgcaggcaccatcaagcaaaccggcacgcaagcagaaactaaactaacacaaccagcacctgcatcaaatacaaaccgcccagacgtgactgaagatattagtgataaccgcagtgatgatgatgttgataatgatatgccacttggtatgcttagtgacgcttctagacactcgagcaaaacaagtgctgttgccactaacgcacctagctacatgaattttggagaccacccatcaataataccaacaaatactaatataatagatagggcagaagttcaagaaagcgctaactcgccagttgattatgatgattttgtcaatgaaggctcagacaactctgtagttagctttgaaatacctgatgacatatctaccattaacgatagggttagctcagagcgacaattagatgaactgcgtaaattagtacctattaacaatcaaccaataaatgagtatggttttgctggcttggaagctttgagtacagtatacaatgctatacgcttcaccgagagtgcttccactaaaccagtaaccaaattgacactaccgccaaatttggttgccagacagacaactgtcagtgcagtcgttatagcatacggagaggcacgaggcgatggtttatgtggtgcacatgccctcagccaactatgcgatagtgatgtagatacagtgaccataatacttaagagagtaaccggcaaccatgactggtggtctgatgttgagctagcgaaagcagcagcagttttaggtattaacgtgctgatagcaacgccagcaggatctattttgtatattaacaactctagcgtgcgccaatatgttagtatatgcactctagttagcttgactggacaacgtcattgggtgccgtgtacaagcatggtggaccagttatacacgagcgatctacggaaccagtactataactacatatttttggcaacttatgcaagcatgagccaagattcaaccaaaactgttgctgatgtacgagaagcagtagaccgtttcgagccgatcaacattgactctgctagtattgtgtcttaccatgttgattatgagtggtctagcataattgctaattacccaaatggtgttttcactaatttgggctatgaacacacatctaaaagtttttatggtcagccaatttcaaactatgttactgagggtgaaaatggtttggtaatggtatcagcaccaacaggatttggcaaaacaacgcgcatagcggaatttaacgatcagaagaaaaatcatgtagtaatatcacctagccgagctacagtaatcagcgccaccgcttactgcaatgatgtgctcaatatagcatcgcaaggtcgtgcagactcaacctggcacccaaaaaacaaaaatgactcaactctcagtagtgcgaaagtagtttatttgacagtcgactctgcatacatggcattgtgtggaagtaaaccgaatgctacttggttaaaaatgttgtctggacggtgtatttggcttgatgaggtacatgatttaacaccaaagtatgtttgcctggccaaggctttaggttctcttgttacaggtgtgttgtctgcgacactacctaatgtaccacctgtcacagacacgctacatccaatacgaactatatttgcagctcctgatcaactagacaatgacttcaatgatttcattgagcgtggtcctgagaaaggatcattttgggtagtacccagttccacgcaaacggctgttatgccggctgaacgtgtcactcaagcagtgaatagtggtgtaaagtttgctagcatcacatctaagacattagctaatctggaactgacgaccataaattcggctatatgtacgaactgtatcactactggttcaaccctacccggcttagaaaacatgcatgacttaggttataggattacccctgagcttatattcccgccatataaagccgagattaagggcattagcaagatgcggttgtttaactataagcgacaccagtatgatatgacgcagttaactcagtcaagagggcgcgcaggtaggacgagcgtaggatacgcagctatgtcgctgccagcagcagctaacatgccagctgtacacgtcgaattactatacagcttgatggtagggatcccagcaaatacacgatgtaaagatctgtatgacaacttaaaaacgaataaggtggattttgacgctattaagcgtgagcgcgatgttgcagtgcaacgtggttatgattttcaaaatgaacaatgggatgtgcttgactcatggattgaaactgtgagtgagttatatctgcacttgaaaaataagatagctttcaccgacgccatggttgacaacaacacaatatcagctgcttttatgtctgcactcaacactgacagcaagttacacattgataaatctgtcaaacgacgaattcagactaacatgcatgacaaactagtccaatatcctaaattgcataaatgcggctgtggattactaacgattctaggaaaacacggatgtggcagccaactagtattgcccaaacctgaggttgagtggttcaatatgacaatagagcagtcatatgctaatggtagtttcagccaccctaaatcaatccttgcaattgacacatcatcttcagctcgtagcgtgaacttgtcaactaagttgtcacaacagttcatgtctctctatttcaagatgctaaacaccatactacactcagccaagcatgctacaaccagtaatgttccaaccaacataacccatggtgtcttgtttgaatgtatcaacagtaataagcacgccgatatttctgaattaaaacacccacataaattgaacaatggatctgtgttaggagtatttgatagcaacacaagagaactacgcctagagtgtgtggttggcacaacaatagattgttcagtcacttcaccacaggccgtagtaattctacctgtacatacagcaaactatgcattaggtatggccctcgctagcttaaccatgaatatcacgctcaatactgctatagcagttgctacgcgctcaacaattatagttggtccacctggctccggaaagactcgtgaattgcataggttgttcgatagcgaccaacacactaaaaggatagtatcaaaacaaactggacaaatatctgagttcaaaaacttgactgtgccaccaacagctgctatatttgcagataacgttgaaaccatatatgttgatgagtttggtttgatgacagcatccgatattttattgttgtctaccaagtgcaatgtgatggtactatctggcgatgtaaaccagaaagttgctgacgatactgacttagacacgtcgaccacactcgatctctcttggtttagggacaatgtagggtctacgaccgtattcaatgagtcttggcgcttcgggtctaaaacggcttctgtattgaattactttggcacactaggcccgtgccacaacgagaatgacaaaggtatcggtatggtgcaatttaactggctcacaaagaagaatatcaactcgattataattgaccatgacatacagttaatcataactcattctaacgctctggtaatgcagataaaacaaatactaggcccaaatagtaacattaattgtatgacaaccggtcgtgcacagggcagccaagaaaagcgcgtattgtacgtagcttatggtaatgccagtgagacatacacggcagctgaattgtatgtagctctctcacgacatagtgaacactgtataatagcagcagattacacatttgaagctacagctaagacatatgggttcaataggcacatgcaaaatgtagagacaatgcggtatggtgctaccatagtgccaaaaatccgtgatctgagtatgagttacatcatggaagcgtggtcaaacatacgatataattatcacgagtttgcggaacctaaatacaacaaagcatttgacaattacgttgggtactataacgctttgacgcactgtgctgaatacttgacgaatgatgtatcagataccaatgggttagatatcagtatatctgcttgtgtgatttacaacaagttgtaccgtggtgtcgatgacagtgaattcacacaacctctgacaccgcaacacttagaagtctataatggtatgacaaacatattcaacacgtttggtcccggaatcacagtacctgtagagagaaccgctaaggtaatgagtgaatacctaaggcctatcgctagtgtaagacagtatttcattataccattttcgactaatgtgaaactagttggtaatgctaataacttcacctcatacgcgctgtgtaatgtgctgacaggtgaaattgtgatgacacaaactaacaatctaacattccaattgcctacagccaactctctccggtcttttgttgaatccatgaagaatagtgttgactgggataaagatatgtgtgtacagatgtcaataagtgaaatactcttccaacgcctgaagaggagtattgccaagtcatatcaagagatgataaacgcatctgagtctatacataattatacgatcagtaacatgccaacactctactcgctgtcatgttgtaaagtgacaaacttgcccaaatcgctaacactgtttgaaaccatagctaatagcttacagactaactcaccatcacccagtgcgatgataactaaagtctatctcgacgctgtcaatcaactagttgaaggtgacacgcctagagggtcgagcctaggctatgcgacattatctgaagagctcatatatgatgctctagtgagcatactgcgtgagttttatgtgcatgataatataagtttgttcatttctcaggtgtgtgatattactgcttcaagttttgaaatcagtgagccctcaaacaacacacatgtattaacactaccaataaagcgtctgcatcaaacggtagaacatctccataaacacatccataacgtagtagttgttgatgtgaaacagcggaagataatcgccactcttgatataccgcctagcactgaacactattggcacattgatgatttgtataagagaacgcacgcactattagtattggggctattggatgaccaaatcaatacatacaataactataaattaagtgatgttctctcaaacatcaagaaaacagcgaccaaagcaattacggcccaagagcagtttttttctaagttgctcaagtatataaaaaatattatcaactcactaggtgtgaaaatgcgcaaagggaaagaaatgttaaacttatgcggtttacaacaattgtttgcagcacgaatgaagcaatcagataaattcacgcaaagtgcagtgaaggcgcgatttgactcatattcactagcaaccagcacgttaaagaaccatgcgatcaaaggcttacagcacctagtattaggccacatctccgaacattatgatattgatatcaacaagcaattacagagaacagttgcttctgcagtgagaatgacacatgacaatcgcgcaggtgatgatagctcaacatctttactattacggttgtactacagcttgaagttctatgcgcagggctatgagtcgggtgctgctgatatcatgggttatgatgtgttcaatattggtaacgtgaaagtgactattaatgaatcattgccagtaatgttattacgacggctcaatgatgatgcgcgtagtagtttaatgggagaagctagtcgaaagcaaacagttaaggcaaagcgcacacaagctaacaataccaatagatgggatgggcaaagtgtaggcctgtccataaagcggatgtttgctactgatggtggtaacacgtctgatgatgcaccttttgacgacctcctgtatgaattgaaggcgactctatcagacagtgtgtctgtcaccacattagaaaacgccaatagacatggaatggttaaacttaattcacttaagatggtacttgccatgtatcctagagtaacaacaaccatgttgactgtcactaaagcttactatgagttatataatcatgtatttacgccaatgctggcagtactacagaatacgataggtagaagcctagtcaaggtaaaaaacagtattgtacgctttttggaatatgatgctactcttgctgatgctaaattagagatacaggatctgcgcgattcgttagatagcgtgcgtcagagccccgtgctcacatcacttgaaccgacaccagtcagtgacgatagtagcgaagctgagtcatctatgtacgaagatgcacatgatggtatgagcaacaagatggaaccatcaagtacagacaaaatacatgagaactcagtactggctgaatacgtcaaacaacaactcatggcaggtaatgggtcaatagatgggtcgctgttcactacctgtgggagtgatgtcaaaacaaaaatggtatacagtcagagaaagaagtacaaatcaagcatgtttgttaaatgggaacatcaagaaaattactcaactgtacatgctagaccgttgccaaaaataaccatgggcacattagatggtgtcatttacatggtagttgacaaagttgctctaaaattagtacccacgtatgaaggttacaaaatatggtggaatgatgcaaatgcactcaagaatgaaaacaaactctgcattggtttaaatttgttaacacgaatagctggtgatagtgctggtgacgtaattttggcattgatcacaaaagtgtttacagatgttatcaactggtgtagactcactaaagatgaattagtctggaaaacgaaatatttggcaggcggcgtatgtcgcgctaaatacgactattcattctctacaacctccttataccacatcctacaagacagcaaaccatttaggcgtctaatgtgccatgacacaaggtcaagattcataatggttggtgacaagatacacataacaaggaggacggaagcattggtgctagattgtcatacttatgctgtagcatgcaatactgctacaggatgttgtctaaccatatacagtgcattacagagccgtattgatataatggtacgagctattgaagcaaacatggtcgctggcttgtgtgattatactgatagagctggcaagtcaggattggatggattgcgcaagttaggtataaacattgattcgaacacattgagtgacattgacttcgctaaatggaaagagattttacgagatgcacttgaaaacaatcctcttagcgctatatttgatatgggcctagatgacacttttacgtctttcaagcaattaatggaaagtgagaaagcgatgctagatatagaaagcagggtcgatagtactattagtttgcttaaatctaaagtagctatatgtatgccaagtggacatggtaagacaactcttaaaggaacactacagagaaagtacacgtctattgatgtgtatgatgctgatgactatattactgacgttgatgccttagggtggtcaaatttcgaccgcatgatgatgcaatataagttgcgcctgtcagatgctgttggtaactcggggaataataagcctaagttggtgttgtgccaccaccctgatgcagtcccagatggatttagcgtagttctgtttatgaataaagaaacaccctacacaccagaacgtttatggaagcgtaccaatgaagaacgcttgctaatggcgcaagacagatatccgctgtacacagtatcgtttgcagatatggaacatcaaactatgttatttatgctacgttctggtgctacgccgagtatcaagttgcatgcgaaaagtgagcttgttgacccgatgccgtacagtgaggcggagcaatttttccaatcgcccggaccagacaatctgtggcacatgccaatacaagggaggctgggtgttaatgatcataggctaggaaccgcacagcaagtaatttataagcaagggccgcatgtcggattgtgtaggccaacggttcaaatgttatgctcaagtactttcaatgctgtctcatcacgtttgcgcggcatagagcatctacgtaaagtcaatttcagtagggaagaatatatggtaaagatgagctattggttcaaaccaaactggcgtgatatactaagggactaccaaaatgaggtagttatgccgagtgtttcagcatcactcgagtgggctatcaacaaagggcacaaagttgagctgatacgcgatatggctgaggcagtcttaaattacgaacgcgccatagaatatacaaatatacaagcacatttcaaagtagagaatctcatgaaagaaaacgtagatgagctagaacaccaacttgggcgtatcattgtttggaacaatcaaaatgtcaacatgatactctgcccaattgttaatgaatgtaaggctcgatttaagaacctgttcaatgacaatttgctaacgtacacagatggcatggacatggtgtcacttaacaagcacctcagtaaaaattcacgctcaaagtatatgattgaactagatctcagcaaacaagacaggcaaacagataaacaaataatcgattttgaacagtggttattaacagagctaggacttgatggcagggttgtacattatatgaatggtatactggatgggtttagcttaaaaacaccagataatgtgacaggtttcatgccaacaatgcacttgtctggtggcgctatgacatcactagggaatgagatgcgtaacttgttactcttatctgacatatgcaaaggcaaagctgtaaaccatgtgtacacactgggtgatgatagcctgatactcacggacgatgattttgacggtaaatacgttgcaatagttgcggctaataaccacaatgttagatgtactttcactacatcagaagattcaggagtcttcctacaactcattgtgatgtgggtcaacggtaggtacatagccgtacacaatttcatgaggctaaaggataagttagcatattcaccatacaacgcagatagtgatgagttcaagtcgaagaccgcgtcgtacttattaatgattggaaaccattatttaactagcaagcgactccttgagctgggattcaatggaactgtcccgttagggacaactatggaagacaggctagaggcaaatgcgttacataacaattgtgatgtggcagatattctaaatattatacatgatattgtagtggtttcatatggtaaacatgaaagcaaaatcacgattactggtgtaggcgtgctaagttaccgccatctcaagagcggtatacatatgactaaaggccggcagagtgacacatctttattagcatcgttccaatcagcagtgcaacaagagttggacagtaactaa

SEQ ID NO: 1254 - DNA, 11401 bp, Sclerotinia sclerotiorum endornavirus 8
  source 1..11401: mol_type = other DNA
caaacaaccaactaaacacaaacaacactttacaacaatgtcttaccaaaccgctgccacaaattcaaacaacaacaagaggagtcttggcctcctccctaaatatttgccaagaaaaaatatgtcacgatctgatgattttatcaatatggatagtgacacttatgccatgacaaacagcaaggtgtccagacacaaccaccctaagatatccaaacttagcacctcattgagaatcatgagggaagatgtgtatgggccacttggggcaattagttcaagaagaaattatgtttacaaagacttgatatgccataaatgccttgatgaacataacaagatctgctctgatgaggataagctcacttatgataatttcgcaaaatataggaatgatatcaaaagtcgaaagacaattggtggctttatctataaatcatacttccacctgaaacttgattgtgaaatcatcggtaattataaaccagttttccctttcttgaatgagcttattgagacaagcgtatcatttgttgcactcattaacctaatcgaacctgagaaaactgttaaaccagtaactgatccagttgttggcggtgacggcttctgttggaaaaaaatctttcctttctcaaactacggtaaattcatgacttatgctcattttaagcaacagttagaatttaagtacaacggagtcttcaagatgtacgttttacttatcatgaccgaggatggtaatttacaccttgaagatgttcagagctttggtttcggcaaagatgaatatttaggccctgaattagcacgtggtgctgaaactgccattggtaaagcagcgccaccttctgcttgggtacatgtatgtaaattacctgaatcgcatactgacctgccatgttggaatgacagcctccacaatgttaaaattgaaacacgcgaaactgaaccaaatggtttaatcagcactaagttcatgaagattgaccagagtgacaacacattaccacatgagctttggaatccgaacaaaactcttgtccgttgttcaattgacaaccttattgaaacattagtcagcaaaattggaaatgacaaaacccagaataaatattcaactatgcggtacggtctttgttactacagtggagttcttgttatgtatagatggaaatttgtcgatgccttaagtaacttcaccagacattactcgattgaagagtttaccgtgtatttgcgtacacttaacatgcaagtaaacaaatttaaagagatacgtggtttatcatggctcaaagaaggtattgttagtacagagtctgatgcaacagatgtgcggctgagtattgatagactatccgacgccaccaacatttatatgaatggttggacaaatacaactaggtgtgctctcgttggatatacaccaaaaaccatgcttgagaagattgcaaatgatatcggtctcgatagtagcatggtcaatactaatcaattgaataatgctattagtgatatggttaataaacgtgttacaaaagctgttaccaaacatgttgataatgccatcatactacctagcagttgtcctgacgatatagtaaatgatctcaataatgaatttggtaatggtacttttatgcgtggcaatacagctcatcactcacatgtctaccaccatggatcacgtgtggctgttactaacatgctatacaactggcacccacgtgagggcttagtctatgacattggtggcaatcccaatgttcacctaaatgctgggcatttcaatgtccatagtgtttacagcacaaacaaagcagctgacaatgctagacacatcaaatgggttaaaaatgctacaagctgggcaaaacgtaattgtgacgttgccaaacaaccaagcatcatacctggtatggcaaaatcaatattgtccgaccaaaatggcgtctggtgtgataaaggattaaaaaactgcgtccattccaacaaggctggttcattcgcaatgagcattgatacaatttttcatatcccgttggaagaactctttgatttttatgtgagaaacagagttattcatagtgtgcatgctctaacaataccaaatgactatagttatagatcgtccggtacattgaaatataatgaaggacactggtacaagaacaatgacgtatggaccattgaatttaacggtgaaagcttaccgtacactcaatctattgataaaacaaacgtcttattaagcacacctcttttcaccttaggagaactagttatttattgcaagattggcggccgacgtggtgcacaccaaattattgaacattttaccttgttacgatctgaactcgacagtctatacgcacagcatgttatgtggtttaatactaacatggatgaattatttgttatgatccctagaattgacatggataaatctaaaacactgatgggtagggaaccattccatcttgaacaagtcgttataaatatcagattttatgaacgactactcaatcgtctcatgcaatcttacacatgggaatcattactcagctatgcagcaggactaattggtagagtatacgcaacgagtagtggtttacatatgaagtgggatttaacaaatgcccaagtacgtgaccattgtctggtagcctactggagcatgaaccacataaatgagtcagcaaaaccattaatccagcaagctgagagatctaaccgtgatccagatttcctcactagcttatggcattcactgaaaaattggattaaagactttggttcacaatttgacccaactggctccaatgttatacaagattttattgcgtacaataagggtgataccctcaagctaattcaaatgtttaataatgcatctaaaagtgtagaatctttatcagttgcaacccaaatggtacactcacgcagcatcattgactgggttagcactgatcttggtatgatttatgaaggtgttaatattagtattgatacttggcgactaagcacacaaatgcaagataaattgccaaccgtatacgatttattaacgtaccaatcatctgagaaaatgtataaacgaagcttgtgtgctccactacctagctgcactcataaccacgatactctccatagtcatgttactggcccgcaaggtaggtcagctaaatgtgtctgctgtggtatatttagcaacatcaacacaaacggtggttgcaacctgtgcagtggcagtgcaccgtgcaccagaaaaaacctgaaatgtcagcatgaacacacaactataaatgatgagtgctgcagcaagaagcaatgcacatgcaagaaaacttttgcatgtctatgttgtgggttagattcagtaggttgctactgtaatgtgtgtgaattatcgccaaaaaacaatattgtgacacaatcaggaaaaccagcaacaaagcaacaaaattaccaagccgctacaaatatgcctaacgcaacaaatgatacgaacacctatgacactaaggctactggcccccccgagctgtcccgggaattcggatttaaacaaagcttcaacagtgacaataaaccagaaaccgacaaaatgtcagaaaacaacagtgatgaagacactatcacagaaccaaaaaattctatattcaccgccaaaccagctaacgatgaacccagtatggcagctgagaatccaaatagtggtgatgttaaccccagtgatgataatgatgatactttcaaatttgttaaagctaagctggctccacttgatgagctctacgctgatagttctatcattagttatcctagcccaatcatcaacattactactgaagaaagagattacaaccatgccaacattaacttattacctgaaaattacagtggcgccattggagtaaaagtagtcaattatgttaacgtacctggggatggccattgtggtgctcatgcccttgcccgtgcactgcacatcgacgtcgaatctattaaaaaatggttctcaatagcgctgggtcatgatgattggaatagtagtgatgaactagttgcatatgcgcaatcaataaacaaaaatattatcacggttgaaaaagatgctgctatattgacaagatccaatcaggatgatacagcaattgccatattacacggatcgttgattggccttggtatgcattgggtgccatgtgaatgtataatcgttagctatgcgtccatgtttaatgtaagaataaatcatacattccaagatatgttagctgctctgccggctactgatgtgatgaatgatgaaataactgcgttcactttcagtcacagccgcgaaaatttaagtaagatacttgctattggtcagtcattggtagttgattacgattacatcagcgtcaaaacacctggccactccaccaacccgatagtaagtgaccacaacacaaacggagtaaaattcattactgggcccacaggtagtggtaagacaacatttgctcatacattgattaagggaaagatattgatagtaaccccgttacggagtgctgttactaccacatacaactacatggcctcaaaatataaagtttgttgcaggtcaaacagtgaatgggcaccaactgaagcaaacaataacacttgccataattatgacatagtgataatgacaattgaaacattatatgcaggtttattcagtcttgagcgtggcaacgaaacttacacacaactcattaaaaatcggagcatcatatgtgatgaaatacacgacttgacaccacactatgctcgcattttaacccaattgcctgctcataaaacgtacctttgctcggccacaatccctggtatttcaacgaactataccaatacgtttgataccaccactagtttcctggcaaacggaacttttgacaaatggtttaacaatgatattgcaagggatgacatcaataatagtacatgttatattgttggaactaaaaatgaaactaacctatttaaaaacaaatccatatgtgcgttaaatagtgacactctaaacagaattgatgttagtaacgcaagcaaaattgttgctacgaaaattgctgctacatctattaccttaccatctattaaaactattatcgatagtggtgtacgcatctatgctgaaattatttttgaacctaccatcaaagacaaaactattcggttttttaattatacaaaatacaactacagctggcttgaaatgattcaatcaagaggccgcattggacgtgtacaggacggttttttctttggtaattgccctagtgattctactccgctatccgtggacagtatgttgctatacagtatgtatactaatacaatctgtccctcatcgctacagtctatatgggcaagtattacgcaagctaattacaacaaaataaaatctcaaattacaaacttatacccaaccgatggcactacaccagaatgggacaatgattttacagcgtggaaatccatttacaacgaattattagttggaaaaaaatcaggactccgacccaaattcagtgatctagaatgcagtcttgaaaatattatgctaaacttaggcaatattgttggtgtcagcaatgtcacaaaaaaaattggaaacagtattatcgaaacatcagtcatgtggaatgaaattggctttgacagcaaattactcaataacaataaaattgattttaataagctcgttgttaatgtcaatgattcacaaagcttgattaacattaaaacagataacaatcaacaactttcagagaaattactcttaatgacagtgtcaacgatttttgaaactatcacagggttaattgcatccggtagtgctatagtgaataagaacacaacagccaatcaggttggacaatttatagtatatccaaacataatggcagctgaaaaaagtcttggtattaagctgcgcgataatgaaattattggaatagtcaacaactcgactaaaactataactattaatattgttaagaacatcccaagtaatgatacgatgatagtagtatccaattatcgaaccatacattataaagctgaaatagccgccattgaagcaataagtgattcgaaaaataacattctacagacgcttagtaatagtaccatctacttcggcgctccaggaactggtaaaaccactgcaatcatgaaacatatggaaggtcattatcttactacaacgaacactcaaatgttgatgaaaaataaatcatgggtgcctcccaacgcagtcccatttaaccaaaatttggtgttagttgacgaagttggcctcatgtctgtcacaactatattgacattagcagctaagtgtaataaattgttgtgcacagcggaccttcagcaaatggtaaacacgcacagtgacacccatactatgtacagtgggtatgagtcagggcttcaattgttgaaaacatttagcagaaatgaagagctaacactaacgtatagatttggccctaaaacttgcgcaatggtaaatagattgggtttcaatctaaagtcagccgttgatagagatgagaccattactagctcaattggtaaagtgagtaataaaaagactattagcaatttactgtttgagattaacccagatttaatcatatgtagcagcaacgctcttgctagatatgtcaggcagatcacttctattaacacctgtaattttgctaaatgccaaggtttagaagttgaaaatgttttagtgctaatagataatttacataataacaaaaaagatgccaatgttaatgaattcgcaagtctgtacgttgccttaactagacacacgaagagagtacatatccacgtatcaacaaacgatgcatcgctactcaaaaccttaaatatcgcccccatgctaggtgagatctcagtaaacaacaatatagggggcagctggacattcaattttgatatttatggcaaaatgttagaggctattgttgacgatttatgcaaatccaattcttttaatgacggtatatcaattttgcgtgagtggggctcaggatatataacgagcaatactgcactactacgtatggataatttcaataccaattatgatccatcgacgctcatatttaattcgcttcatacggatgtaacaactggtttagaagtatgcagtgttagcttatttggccatagcatttatttatttaaattgttcctagatgataacaaaaccatagttgagttgttgactagtggtttgcctagtggcacagttgtcaaaaaatttatgattttaatagggaaaaaattcattaaaagaaccggtagagtaacagctaaattaatatctgcaattgcgtcaattatgagtataccgcgtgagatatatgaatttgttatgtcatttgacttggaagacaaacacaatattggcggcggtatcaatattgggcatttgtttgggatggcattacttggcattaaaaaagcagttgtactgttaatacgtataacaggatcaatcaaggacaaagtaatgagcagcgttgacggcaaattaaccgcacaatttttaaaagactacttttacgcatattttaacaccacctacagtagtgacgttgggggtggagtgtggccatcaaacattgttaacctgttccacgcatgtaatgagaaagtatcaaatgccgcaacccacatatacgattggatttgcagtatcattaaaaaaatagtcgctttcatgtcaaaaaacaataaggatggtgatgtagtaaacgatacacacattggtactgatcaacaaaacaagcaatatcatgaccacgacttgaaagaccggtcaacattagcgaaaaatacggtgggcaacgcaattaacaaaaatagcagaaaattgtcagttaccttcaatgaacaagccataaactactataatgatgggaacaccgaatacaccaatcttgatggtgaatcaaaaaaattgtcaagggcgcaacgggctaccttgcaattaaataaacaactaaatatcagtgataaagaaacaaactcaccaatacttatggattgcgacacagatgagtggactgatgattatgagttactgtttgactatgatgagattgtcagcgaacttggtgccgaaagcagtcaaagtttaactgatgctggtaattgtgaaaatagaaattatgattataagacacaagccagtgcgtctcataatgctactgataatgatatagctgacttgaccaccttgaataaaaatttaaatgtgaacgacacaactaaaaaaattgaggtaaccgaaccgcaaagctacaacgatgtaagcactaaacccagcagattggaggcaacaaaattagcagactatacctatataagcgacgtgaaaacaaagctaaatttcaacacatttaggcctaactttgttgggcgtatggtaatgactgttaaagaaggcaccatagttgctaatattaatataccaggagcaggaaaattcggaattacagtaaccaaattagaaactgaaggcgagcataaaataatagtgaaggataacaattctacaactgatctaataatgattaaaaccgatgatgggtatggtgtttatagtcaccacaataataatgctttcagcatggaagcttttggcactgctattaaacatatttccaaattgggtggaggccaaaatgattcagcaattaacttaatcaatgatatacttaaaactgtataccagtttgggaaaaaactaatcaaattgagctcatataaaatattgtatgtagctggcaaagttagtcaacgctgtttagtttccgataacgattgtcttaccacatacagaaagttgtgtaagcgtataccaacatgttacaagttttcaaaagaataccaatactcaacaagtggtgggacaacattatcaacaatcgagattatgtccacaaacaacagcccaacgaagctgtttattgggatatttgaggtgttcggtaaaacacgtgtcgttctttattcaaataatgttggtctgaccaatatattagaacgactattgctgacaaccaatgcgcaagcgtacaatgatgagattggcggatccgatggtgcaatatctgcattactcaagctcggtatcaatgtcaaagacatactctaccataataatgatttaggtgttaatgacattaaaaaatggttatacgctaaccccctaaattcaatgttcagtacatcagatgaaccaacgcatactagctataaatcactactgtaccaagagatgcatatgcatagtgaacttcgtgataagttagataaaactggaactagcaaaaggaaaattgctttctgcatagcaagtggccatggcaaaaccacaactgtaaaccgcatcagaagacaaaatcttgaattcaacatcttagacgcggacgaagttcaagagcaagctaacatattgctgttgccatttacagataaaatgcttaattacaaagctaaacttgaaaaatatagtgctgaacatccacaacttgatgctatgtttattcattcaccaatctgtgcccctagcgggtacaaactcgttacaatattgaacgacgctgcagtagtcccagttgacagagtgtggtcagaagacaatgtagaacacctcagtaagtacggttctgttactcacgttaatgggtatgaggacctgtataaactttgtgttagttatttaaacaaaactgctacaggcgatatcacgctcgagaatggagcaacgatagttgacaatattgactcgatattgggctatgattttatgcataaccagccaggatttgatgatttgtttagattaccagttgggtcacaagatagacttgaatttagtaatggtaatctaggattagggcaacagcgcgtatacgtcactggcgcacacgtcgatgtgatgcgaccaacaatcagtaagttaccttcagctttgccgaatgccatcacgtctagactcatgggtagacaaaaattgcgcagtatgcatatgactattgatgattatgaacatttaatgtcaaaaatgttgatcaaagattataagactatgttagagatattttcacaagacacaatatccatcaactatagagacatactagattggttagtaaacaaaggaaacaaactgcagctactagaaacgatgcttaagaaagtcgttaatgacgagcatgctactgacccagctagcataagcgtgcactataaggtcgagaaccttatgaaagagcaagttaacgacatcttagaccaagttggcagagtcattgtttggaataaccagaatataaacatgtatgcttgtccattaattaatgaggcaaaagcacgtttcaaaatgatgctcaagccagacgtcacatatgctgatgggatgacaattgctgacttaaatgaatcaatatctaaatatagatcaaaatggctattagaaatggatctgtcgaaacaagacaggcaaacagacatgccaattctaaaatatgaatgggatctaatgagacggcttggggtaccagaagattttattgagtttatgacatctttcatgccaacttttaagataactggttctaacaatgaaaaagcaaaattgccagctatacattttagtgggggtgctatgaccagtattggaaatgaaatacgtaacttactgctgattgctgattgcgtgggcaataattatacagccatttatacgctaggggatgacagccttgtactaatggacagtaagcccgacttagaatactatgataggatctgcaggagcagacacaacgtgataaacacagccctatgtgataaacagtgtgctcttttccttcaaatgattgtcaaccgcgatgctgatggaacattttatttgtcacacaatttccaaaggttgaaagaaaaaattgcgtattcagcgtatcctaattcaagcagtgattggaaaatgaaatatgcagcatacctaatgatgattgggtataccaaacaaaactacaatgcgatgatcgagatggggtttgcgacatttccacatttgggcactagtatgtcgcaacgagtatcggccaatgctatatacaataaaatctctgaagtgtcagtatttaatttaataaatgatataattcagacgaaaaacgtacagagtgaggaaataattatcgacacgacaatggtaatgactaagagcaatctgctaaatgggtataagagagttgggccttatgttgataatcatgccactatgcttaatactttgcaagagtatttcagtgagcataactaa

SEQ ID NO: 1255 - DNA, 13503 bp, Sclerotinia sclerotiorum endornavirus 9
  source 1..13503: mol_type = other DNA
cgatctaactacaccaaatctaacaccaacaccatgaaccaatcaccacgaaacaaaataacaaacattattgattctgttgctctcgaggctaacaacagaatcatgactctcgaaaaagcctcgaaaaacaaacaaaaacaaacaaaaacacaggaaactgataaaacgaacatcagctcatttggtactagatctttaacccataccattgaccattcagcatcaccatcttccaaccttagtggtgatggcggtagcagtgttaaccataaccgctacaaggggccattggctactttagcaacaagtgaaacacggccacgtgaccgcgttgagcgaaagacagcgacggatttagctgacgttgagttatattcgggtaactctgacaagttaaacgcactacagatacaaattcctagcgataagagcgagtctaatgaagctcctaccacatttactgagatgggttttccaaaacacgacatccctgaaccttggtacgtcaagatgttatcaacattccgctctagtgacacgaatgctgaccattacaagtcattacatggggtatcgcctgcaagtcaaactgttattccatggaagcgaacagacgtgccaaaacctattgaagatgttctagataacagtagaacccctgatacgcccacccttagttcggcacgaaagtcgtgtttgtgggtagcaatgcatacccttaatccaaggggcatggaacagatacctatcaacataagcaatctaaagtatctggactaccaaaaatacaaagtctggcgagcaggtgtgacaaaaggttggttagctatcgaaataagacgtgatcactccaaaaatcacttgcattgcctttccggcaaccacaaggaacaattgttgtcaggtgatggtaaattgacgggtgttatccattggacaaagatgttcactgagattaacaatgaatctcagctatcctggggccaactaaattggagcaaccctgatgcgggtttgattaatttttaccacacgttatttcgtagcactaatacttcaatttcaactagtctgtatatacattgtgagaaatctaccatgcgggaactcatagattaccagtatccagggttcaagcaactcggtaagacgtttgctttgccagaaccgttcccaacccctatgccgctgggcgtcttaattgaacattttaaactcaagattaacctgaagaagggccagcaacttacatctatattgcgaaatgccaagcaccattacacgcttaccttaattgaccagagcaatattgagttgcgtaaagtacctgcaacgtttgatgactcatcacatctcagtttcagggcactcgacacaatactgtcaacgatttacagcatgtctcaagataggcaattagctatgaacaaccagaaaaatcagaaaatattgcctaaacctatggtaggcggcaaaggtgactgttggcaacaaattaccatgttttacgcctatactgaactatggtttggacgcacagatcgcagtgatgctatgcccatggaagaactttatgagataatcaagaagaaggcacttgttgagtacccaatgtttaggtttacgcatgagggtgacaacatgtaccacgttgagtatgttggtttagataggacccataagccatcctacaaagaaatgtggactgaagaagaatatgcagaaatcatggctgaagtcaaagtcaaatacgcagggtgttacagattaccggatttggctattgaatttaagcggataattgaccaaaaagaggctgagcacatgtcagtcgaaatcgacttggcttttgagtgcacagcttacattgacaaaatgtatgatctattcgtacgtgatgattatataactaccgaagagattgataacgatgtagataatttcttcaatgcagttgaagccgtgttaacgcaatatgagggcgataacatgctattggttggcgcgaaggctacagtgcttgaaaagctagcgcatgatctaaatgtgcctctaagtatgcttgatagtggtgcagtacgagcacaactagcatctactattgcttccatgtcagacatagcggtaaaaccacgtgacacaagagtagagcaactacctaacgacacgagtgacttagttatcgaccagttgagccgcgactatggtaattttaagtttattcggggctcaagcggtagccatccacacccttaccacaacgctgctcggcatgtcattacgcggtacattgtttctcttttcccaaaatcagacctgttatatgacattggtggtaacatgttgtatcacgtacaaaatggtgattggcatgtgcactctgtattcaaggctgaatcttacgaagataagtcacgatacttaacttacactacggctgtcgttaaacacattagcgtgagaaaatcacagaccaacatcaccggggcgaccaactcaatcacccaaagcatgttgtcaaaggtgttaacagcggacaataaactgtggtgtaacagtgcgtggggtgattgccaacacgggactaaaaaccatgccactttcgccatgtccgtagatacactttttaatattgagccatctgagctgttaaaaggttatattgcacacaaagtaattatggcaaaacacgccctgactgtgcccaaggcgtggcatatggctgactctggaacacttatgttcgatgaaggttactggtcaaagtcagatggcaacctaaacgtggtgttcccgggtgagtcaatgacctaccagaatagtattagtttaattgatacatacatcaagcgcccattaattatgggtgatagccatgccgtatactgtagagtgaatggatataaagggccacatttaatgatagatcatttcgtgctaccacgtactctagtcatcgaacaattcatgaaacatactatctggtcaaatcctgacacaaacaccattgtagttgtagtgcctgtcattgacatacatgcgccagtcactttattaaaacaacagccatttactatggaagcaatggtattgaatatacccttttatgaaaaattgatgaataggctgttgcaaccacacacatgggaagggctcacccaatacgcggctggcttagttggccgtacttacggatcagccagtggtttcacgcgtcaatttgacatcactaacagggatgttaagaatcattgtttagtagcatattggtcaaacaaccgttcgcttgaatcgattcgtccattggttaagcgagctgaggttgacgtgcatcagccatcattcttacaacaactttggtcatcacttaaaactttcttaacagagttggggcgtcaatttgaccccacggagactgacttcattaaaaaattggtcagtgataattcagaagactcaatgcatcttggcctattactagacagtgcattcaaagccatagacagtgttaatgccagtactaggttggacgtatcccattacataactaacggcatgatgtacgagacaggagtcacagctacaacgaagtgtgtagacattgacacatggcgtcaaaaccacgttgaggtgtcacacagcacagtgtacactttaattactggcaaggatgatatagcacctgtcacaattgtgtcgtgtaaagctgctgctgcatgccaacataatcacaaggtagcccatgagcatatcgttggcaactcaattgatcaacgcgtagggatgtgcaactgctgtggtatacttagcactctaaccgaccaaaatctatgcgcactgtgtgggagcactcgattgtgccatggcaaaagccacctgtgcaagcatgagcacacggtacttaacgatgagtgttgtggcaagccagcatgcacctgcaagaagaactataaatgttcatgttgccaaatgccaagctccttgccagtatgtgaaatgtgccgcaacgctccgccagccaaaactgccgtgtgggacgcaggcatcatcaagcaaactggcacgctagcagaaactaaaccaacagaaccagcacctgcatcaaatataaaccgcccagacgtaactgaagatattagtgatagccacagtggtgatgatgttgataatgatatgccagttggtatgctgagtgacgcttctagacactcgaacaaaatgagtgctgttgtcactaacgccccaagccacatgaattttggtgaccacccatcaataataccattaaatactaacataatagatagagcagaagttcaagaaagcgctaactcgccagttgattatgatgattttgtcaatgaaggctcaaacaactccgtagttagttttgaaatacctgatgacacatctaccattaacgacagggttagctcagagcgacaattagatgaactgcgtaaattagtacccattaataatcagccaatgaatgagtatggttttgctggcttagaagctttgagtacagtgtataacgctatacgcttcaccgagagtgcttccaccaaaccagtaaccaaattaacactaccgccaaatttggttgctagacagacaactgtcagtgcagttgttatagcgtatggagaggcacgaggcgatggtttatgtggtgcacatgccctcagccaactatgcgatagtgatgtggatacagtgaccacaatacttaagagagtaaccggcaaccatgactggtggtctgatgttgagctagcgaaagcagcagcagttttacgtattaatgtgctgatagcaacgccagcgggatcgattttatatattaacaactctagcgtgcgccaatatgttagcatttgcactctagttagcttgactggacagcgtcattgggtgccgtgtacaagtatggtggaccagttatatacgagcgatctacggaaccaatactataattacatatttttggcaacttatgcgagtatgagccaagactcaaccaaaactgttgctgatgtacgggaagcagtagaccgtttcgagccgatcaacattgactctgctagtattgtgtcctaccatgttgattatgagtggtctagcataattgctaattacccaaatggcgttttcaccaatttgggctatgaacacacatctaagagtttttatggtcagccaatttcaaactatgttaccgagggtgaaaatggtttggtaatggtatcagcaccaacaggatttggtaaaacaacgcgcatagcggaattcaacgatcagaagaaaaatcatgtagtaatatcacctagccgagctacagtaattagcgccactacttactgcaatgatgtgctcaacatagcatcgcaaggacgtgccgactcgacctggcacccaaaaaacaaaaatgactcaactcttagtagtgcaaaagtagtttatttgacagtcgactctgcttatatggcattgtgtggcagtaaaccgaatgctacttggttaaaaatgttgtctggacggtgtatttggcttgatgaagtacatgatttaacaccaaaatatgtctgcttggccaaggctttaggttctcttgttacaggtgtgttgtctgcaacactgcctaatgtaccacctgtcacagacacgctacatccaatacgaactatatttgcagctcctgatcaactagacaacgactttaatgatttcattgagcgtggtcctgaaaaaggatccttttgggtagttcccagttccacgcaaacggctgttatgccggctgaacgtgtcactcaggcagtgaatggtggtgtaaagtttgctagcatcacatctaagacattagccaatctggaactggcgaccataaattcagctatatgtacgaactgtatcactactggttcaaccctgcccggcttagagaacatgcatgacctaggatacaggattacccctgagcttatattcccgccacataaatccgagattaagggcattagcaagatgcggttgtttaactataagcgacaccagtatgatatgacgcagttaactcagtcaagggggcgcgcaggtaggacgagcgtaggatacgcagccatgtcactgccagcagcagctaacatgccagctgtacacgtcgagttactatacagcttgatggttggcattccagcaaatacacgatgtaaagatctgtatgataacttaaaaacgaacaaggtggattttgacgctattaagcgtgagcgcgatgttgcagtgcaacgtggttatgattttcaaaatgaacaatgggatgtgcttgactcatggattgaaactgtgagtgagttatatctgcacttgaaaaataagatagctttcactgacgcggtagttgacaacaacacaatatcagctgccttcatgtctgcactcaatactgacagcaagttacacattgataaatctgtcaaacgacgaattcagactaacatgcatgacaaactggtccgatatcctaaattgcataaatgcgactgtggattactaacggttctaggaaaacacggatgtggcaaccaactagtattgcccaagcctgaggctgagtggttcaatatgacaatggagcagtcatatgctaatggtagcttcagccaccctaaatcgatccttgcaattgacacatcatcttcagctcgtagtgtgaacctgtcaattaagttgtcacaacagttcatgtctctctatttcaagatgctaaacaccatactacactcagctaagcatgctacaaccagtaatgttccaaccaacataacccatggtgtcttgtttgaaagtatcaacagtaataagcacgctaatatttctgaattgaaacacccacataaattgaacaatggatctgtgctaggagtatttgatagcaacacaagagaactacgcctagagtgtgtggtaggcacaacaatagattgctcggtcacttcaccacaggccgtagtaattctacctgtacatacagcaaactatgcgttaggtatggccctcgctagcttaaccatgaatatcacgctcaatactgctatagcagttgctacgcgctcaacaataatagttggtccacctggctccggaaagactcgcgaattacataggttgttcgacagcgaccaacacaccaaaaggatagtatcaaaacagacgggacaaatatctgagttcaaaaacttgaccgttccaccaactgctgctatatttgcagataatgttgaaaccatatatgttgatgagtttggtttgatgacagcgtccgatattttattattgtctaccaagtgcaatgtgatggtactatctggcgatgtaaaccagaaagttgctgacgatactgacttagacacgtcgaccactctcgacctctcttggtttagagacaatgtagggtcgacgacagtattcaatgagtcttggcgcttcgggtctaaaacagcttctgtattgaattactttggcacattaggcccatgtcacaacgagaatgacaaaggtattggtatggtgcaatttaactggcttacaaagaagaatatcaactctatcataattgaccatgacatacaattaattataacccattctaatgctctggtaatgcagataaaacaaatattaggctcaaatagtaacattaattgtatgacaaccggtcgtgcacagggcagccaagaaaagcgcgtgttgtatgtagcttatggtaacgccagtgagacatacacggcagctgaattgtacgtagctctctcacgacatagcgaacactgtataatagcagcagactacacatttgaggctacagccaagacgtatgggttcaataggcacatgcagagtgtagagacaatgcgatatggtgctaccatagtaccgaaaattcgtgatctgagtatgagttatatcatggaagcgtggtcaaacatacgatttaattatcacgagtttgcggaacctaagtacaacaaagcatttgataattacgttgggtactataacactttgacacactgtgctgaatacttgactaatgatgtatcagataccaatgggttagatatcagtatatctgcttgtgtgatttacaacaagttgtaccgtggtgtcgatgacagtgaattcacgcaacctctgacaccgcaacaccttgaagtctataatggtatgacaaatatattcaacacgtttggccccggaatcacagtacctgtagagagaaccgctaaggtaatgagtgaatacctaaggcctatcgctagtgtaagacagtattacattataccattttcgactaatgtgaaactagttggtaatgctaataacttcacctcatacgcgctgtgtgatgtgctgacaggtgaaattgtgatgacacaaactaacaatctaacattccaattgcctactgccgactctctccggtcctttattgaatccatgaagaatagtgttgactgggataaagatatgtgtgtacaaatgtcaataagtgaaatactcttccaacgcttgaagaggagtattgctaagtcatatcaagagatgataaatgcatctgagtctatacataattacacgatcagtgacataccaacactctactcactgtcatgtcgtaaagtgacaaacttgcccaaatcgctaacgctgtttgaaactatagctgagagcttacagattaactcaccatcacccaatgtgatgataactaaagtctatttggacgctgtcaatcaactagtagaaggtgacacgcctagagggtcgagcctaggttatgcgacattatctgaagagctcatatatgatgcacttgtcagcgtactgcgtgagttttatgtgcatgataatataaatttgttcatttctcaagtgtgtgatattactgcttcaagttttgaaatcagtgagccctcaaacaacacacatgtattaatactaccaataaagcgtctacatcaaacggtagaacatctccataaacacatccataacgtagtagttattgatgtgaaacagcagaagataatcgctactcttgatataccgcctagcactgaacactattggcacattgatgatttgtataagagaacacacgcattattagtattggggctattggatgaccaaatcaacacgtacaataactataaattaagcgatgtcctctcaaacataaagaaaacagcgaccaaagcgatcacggcccaagagcagtttttttctaagttgctcaagtatataaagaatattatcaactcactaggtgtgaaaatgcgcaaagggaaagaaatgttaaacttatgcggtttacaacaattgtttgccgcacgaacgaagcaatcagatgaattcacgcaaagtgcagtgaaggcgcgatttgactcatattcactagcaaccagcacgttaaagaatcatgctatcaaaggcttacaacacctagtattaggccacatctccaaacattatgatattgatgtcaacaagcaattacagagaacagttgcttcagcagtgagaatgacacatgacaatcgcgcaggtgatgatagctcaacatctttactattacggttgtactacagcttgaagttctatgcgcagggctatgagtcgggtgctgctgatatcatgggttatgatgtgttcaatattggtaacgtgaaagtcactatcaatgaatcattgccggtgttgttattaagacggctcaatgatgatgcgcgcagtagtttaatgggagaagctagtcgtaagcgaacagttaagacaaagcgcacgcaagctaacaattccaacaagtgggacgggcaaagcgttggcctgtccataaagcggatgtttgctactgatggtggcaacacgtctgatgatgcaccttttgacgacctcttatatgaattgaagaccactctatcagacagtatgtctgtcaccacattagaaaacgccaatagacatggaatggttaaacttaattcacttaagatggtacttgccatgtatcctagagtaacaacaaccatgttgactgtcactaaagcttactatgagttatataatcatgtgtttaccccaatgctggaagtactacaaaatacgataggtaggggcctagtcaagattaaaaacagtattatacgctttttggaatatgatgctactcttgctgatgctaaattagagatacaagatctacgcgattcattagatagcgtgcgtcggagccccgtgctcacatcacttgaaccgacgccagtcagtgacgatagtagcgaagctgagtcatctatgtacgaggatgcacatgatggtattagtaacaagatggaaccatcaagtacagacaaaatacatgagaactcagtacttgctgaatacgtcaaacaacaactcatgtcaggcaatggttcaatagatgggtcgctgttcactacttgtgggagtgatgtcaaaaccaaaatggtatacagtcagagaaagaagtacaaatcaagtatgtttgttaaatgggaacatcaagaaaattattcaactgtacacgctagaccgttgccaaaaataaccatgggcacattagatggtgtcatttacatggtagttgacaaagttgctctaaaattagtacccacgtatgaaggttacaaaatatggtggaatgatgcaaatgcacttaagaatgaaaacaaactctgcattggtcttaatttgttaacacgaatagctggcgatagtgctggtgacataattttggcattgatcacaaaaatgtttacagatgtcatcaactggtgtagactcactaaagatgaattagtctggaaaacgaaatatttggctggcggtgtatgtcgcactaaatacaactattcattctctacaacctccttataccacatactacaagacagcaaaccatttaggcgtctaatgtgccatgacacaagatcaagattcataatggttggtgacaagatacacataacaaggaggacggaagctttggtgcttgattgtcacacttatgctgtagcaagcaatactgctacaggatgttgtctaaccatatacagtgcattacagagccgtattgatataatggtgcgagctattgaagcaaatatggtcgctggcttgtgtgattatactgatagagctggcaagtcaggattagatggattgcgcaagttaggtataaatattgattcgaacacattgagtgacattgactttgctaaatggaaagtgattttacgagatgcacttgaaaacaatcctcttagcgctatatttgatatgggccttgacgacacttttacgtctttcaagcaattaatggaaagtgagaaagcgatgctagatatagaaagcaaggtggatagtactattagcttgctcaaatctaaagtagctatatgtatgccaagtggacatggtaagacaactcttaaaggaacactacagcgaaagtacacgtctattgatgtgtacgatgccgatgattatattactgacgttgacgccttaagatggtcaaatttcgaccgcatgatgatgcaatataagttgcgcctgtcagatgctgttggtaactcggggaacaataagcctaagttggtattgtgccaccaccctgatgcagtcccagatggatttagcgtagtactatttatgaataaagaaacaccctacactcccgaacgtttatggaagcgtaccaatgaagaacgcttgttaatggcgcaagacagatatccgctgtacacagtatcgtttgcagatatggaacatcaagctatgttatttatgctacgttctggtgctacgcccagtatcaagttgcatgctaaaagtgagcttgttgacccgatgccatacagtgaggcggagcaatttttccaatcgcccggaccagacaatttgtggcacatgccaatacaagggaggctgggtgttaatgatcataggctaggaacctcacagcaagtaatttataagcaagggccacatgtcggattgtgtaggccaacagttcaaatgttatgctcaagtactttcaatgctgtctcatcacgcttgcgcggcatagagcatctacgtaaagttaatttcagtagggaagaatatatgacaaagatgagctattggttcaaaccaaactggcgtgatatactgagggactaccaaaatgaggtagttatgccgagtgtttcagcatcactggaatgggctatcaacaaagggcacaaagttgagctgatacgcgatatggctgaagcagtcttgaattacgaacgcgccacagaatatacaaatatacaagcacatttcaaagtggagaatcttatgaaggaaaacgtagatgagctagaacaccaacttgggcgtatcattgtttggaacaatcaaaatgtcaacatgatactctgcccaattgttaatgaatgtaaggctcgatttaagaacctgttcaatgacaatctgctaacgtacacggatggcatggatatggtgtcactaaacaagcatctcagtaaaaattcacgctcaaagtatatgattgaactagatctcagcaaacaagacaggcagacagataaacaaataatcgattttgaacagtggttactaacagagctaggacttgatggcagggttgtacattatatgaatggtatactggatgggtttagcctaaaaacaccagataatgtgacaggtttcatgccaacaatgcacttgtctggtggcgctatgacgtcactagggaatgagatgcgtaacttgttactcttatctgacatatgcaaaggcaaagctgtgaaccatgtgtacacactgggtgatgatagcctgatactcacggacgatgatttcgacggtaaatatgtagcaatagttgcagccaataaccacaatgttaaatgcactttcaccacgtcagaagattcaggagtcttccttcaactcattgtgatgtgggtcaacggtaggtacgtagccgtacacaacttcatgaggctaaaggataagttagcatattcaccatataacgcagatagtgacgagttcaagtcgaagacagcatcgtacctattaatgattggaaaccattatttaactagcaagcgactccttgagctgggattcaatggcactgtcccgctagggacaactatggaagacaggctagaggcaaatgcgttacataacaattgtgatgtggcagacattctaaatattatacatgatatcgtagtggtttcatatggtaaacatgaaagtaagatcacgattactggtgtgggtgtgctaagttatcgccatctcaagagcggtatacatatgactaaaggccggcagagtgacacatctttattagcatcgttccaatcagcagtgcaacaagagttggacagtaactaa

SEQ ID NO: 1256 - DNA, 11673 bp, Setosphaeria turcica endornavirus 1
  source 1..11673: mol_type = other DNA
atgaccaccacctacaccaccgacaacaccatcacgacccaccaccaagcaatgaagacacacacacacacaaacatcattgctggaggaacgcaagcacccagcgcagcaatgattaatgggtgcaaaaataaacatggtgatgctgaactccatgacaaaactaaatcagcatttgaatatgagtaccaaatcaagcctagaggctctgtcagggcggctgacacatcacccgtgggtggcgatggaacgtgttggaagaaagcgttcagacacgcctgttcattggaaacaattgacttgatggcgtcctggaccaatgccatggttgacatacagacgttcataaccgtttacagaagactgagcatcgccttcggcaagccacagatgatggacaattttttctttatgactatgaatgactcaggagttgcccatttggtgtccgtgtatacacccagccagttcgaagaactagttgagtccaggaagctcgagggcatccggaaaagcgcaattcgtgcgtcgtcgctttacaacccccagtctggtataaacgctgacattatgtatgtcaaagaagcagccgtggaaaagcgggatgctgctggcaaacggtacaaagtcaaaactagaccacaactgaaaatgaagttgtcacgacacggcactcctacacctgaccctggtgtgtaccaggacattctacgttggaacggctacgagctagaggaagaagaatggataatgttggccatgttgaacagcaattctatgaaggatttgcgtagcatcaactcatttgatgaattacaaacgcacctcgaaatgttgagtgaactgactgaaatcagcatggaaactctgactgactcgctactcgactatgaagttggtagtacactgctggaacgattcggcataacagtctctgtagttgataacaacattgccatatcaaacagagatcgtagtgtgactgttcgtgtccctgttgaagccatgcttgaacacacaggtgctaaccgcctcgagatgtaccacatcctaaatttctgctacgctgccgatggatataccgtgattgagcctgaaaacctcctgggaggcataagcatccttgaacaaatcagtcgtgattacaatgtgccactgtcattgataaataatacacagctaggcaacacattgctggagaccatcaacaaagtagccaacattagcgtgcgacaaaatgatggcaaagccattgaagtgccagaaaccatgcccgaagaagctttcaatgaaatctcaagagattttggtagattcaacatcgtaagagtcaacaatgggaaccatccccacccgttccaccacgcatcgcgtcgcgccgtcactaagatgattgtctctcgttacccaagaagtgatttactctatgacctaggcggtgacttcaactaccacatatcgaaggacaactttcatgtgcacagcgttttcaagacagacaacccaaccgatgaggcgcgttatattaacttgagcaccaaagaggtgaagtcaataaacaaccgtctcgcctcactggcagatcgccaaggcagccagagcgtggcaatagaaagtgttttgaacaccattaaatccaaggacaatgtcatgtggtgcaacaacagcgctggccactgtaaccatgcgccatccaacaagttaagttttggaatgagtgttgacacattgtttcacatcaagccagaagagttgatcaaattttacctacacaacaatgttgtgatgtccacacacgccatgacagtgccaaaggattacaaaatcaaagcgaaaggcaatctcaaatatgatgagggagtttggaccgtcagcgatgggaatctagatattgtgttcgccggtgatagcacagtttacagccaagaagttgaagtgcttgacacatacatgtttcaaccgttgattgccacaaacagacatgttatgtacacgcgaatccaaggctacaaaggggcgcatcttattctggaacatttcatgcttgaacgatcaattgtagacaatcttattttcaagcacgccaagtggataaattacaactatgacgttgttgctgtcagaatcccgaaaattttacttgacaagccaactagtctgcttgacagagaaccacttgatttcgaaactgaacaaattaacatcagattctatgaacgactgttgaataggatgatgcaaccatacagttgggagtcattgaaatcatatgcagcaagcaacgtgggccggagttacatgaccagtgctggtattgaacaggtgtggaaaatgaataacaaatccgtcatggcccattgcattgtagcgtactgggcaatgaataggcaggtggaatcaatgatgcctttggtgcatcgagctgaagagcgggcgagacccactgggttcttccaacaactgtggaaggtgttaaagaacatactggtcgacattggtaacgagttcgacccaacaacgataagtgaagttcaaaacttcttttcggaaaatgcaacagacgatctgcaacttgtgcaactgttttcaacactcaattcccagattgaatcactcaatgttgccaaccaactgtcagcgagtcataacatcattgatagtgtcttgaccaccttgccaattgatgttgaagttaattggactgacattgatacatggcgtgaaaaccatgacgattccaaccgcaaaacagttgtcgacctggttgtaaccagaggtgaaatgccaacactgaagacaacatgttcggcccaccaccaatgcccacacaaccacttcaagccgcatggccacatcacgttttcccctagtgtgatgccgcttgggctatgtgcatgctgtaaaattgacagcaacgtatttcctgatggcacatgtttgttgtgcactgggcacgaacaatgctctggttacaagaccacatgcaagcacacccataaactactaaacgaagaatgttgtggaagacctgtgtgcacatgtgtcctaaaaaacacctgtgagtgctgtggaaaaaaatcaaaagatttgtattgccgcctgtgcaagcctgatccaagcacgcgaccaaaaaaaactactgttagccgagcgaagtttgatgacgaacaaatggttgatcacagaaaccaaggcaactttgatgatgcaccgctgtttgacatggacggctccaacattttagacgaagagagcgatggagctgtctcgatcacgtgccagcaagaaccacagcatgttgataagcccaccacagaagatgacactgtcaagaacgcaactgatgcaatcagcaaagttgatgttgtgacacaagatttaagccgccaagatactcaacctgacggtggcagtggaaaccagcatgatggtgacaaaactcactattcgccaccaccacaacatgaagatgaaacccctaccaaggttgacccagagacaagcgctacagctgataaacagccgacgcctgcaatagggaaaacatcgccaggcgatgtcagtaacacaaaactcgggcaaccatcaatgacaaccgccacggagccgaccaccaaactgcatgaagatattgacaggggtgaatcaattttgaacactatacgtgaggtcactggagagacttctactacttacacactgcatgaagcaatgtctgtcggagtgcgcagaccgacttttgcccataaactggagtcaggattttctagctttaaattaccaaattacagatacaagcgcgtcaaccatgttgacgtgacaataacgtcaatcggaacgtccctagatgatggcacgtgtggtgctagctccctgagtcaaatatcaaacacgcctgttgacgcagttaaagagtggctaaagtcagcggtaggttctgcggagtggtcaagtgaaactgatctagcgtcttttgccatagcgagtagtatgaacgtggtgatatgcacaagcgatgccgcccatttatacatgaacaacacctcaggaatagctcacgcaataacaaccacggaaccacttgatggcaaccaacactgggtaccatgtacgttggaagtgtcactgtactacagcagtttcgtgacacaagaactggccacttattataagctgcttaggcaccttgaaaccggcggtcatgctgaacaagattggaacatggtcacgaactataagttaaggttgtcagatgctgcagccgcttacacactcagaggccaatcatgggataccatactaaaattattccacacgagccaagtgactgatgatggagttgtgcacaagtctgaattctactcaagcacaaatatcagcgattacataatcaaacggccctctggcttgagcatgattatagcaccaacaggattcgggaaaaccacgcaactgcacacgctgcacaaagattcaactaagttgctgatactaacaccaacaagagccaacgttaaaagttatgtgcagctaatgcaatcaaaaaaaatcactgtcgcaggcagggcagaaagcacatggttccccgacgacagcgcaataaaaaaccccggcaaagtgcgaatcatcgtgatgacagtcaacgcagctttctcagctttatgtggtgaactaccaaacgccaattacctgaggctgattgctggtcgcaaaatatattttgatgaattccatatggttacaccggaatatttcacattatgtagtcgactaggcaatttagtgtctggcgtgatgacggctacaccgtatggagcaatgtttgatgtcacaacacgccacccaataactagccgctggcaaagtgatgaagctatgaccttgttgcttgagtcatactacgaagatggcgtacacgatggtgaattgttggttgtgaaatccaaacaacttgcataccacactgcttcaataagtgacaaaccatgcgctagcatcacgtctgagacagtaggacagctaaatttgtcaaactgccacaaagcggtggctaccaattgtgtaaccaatggtgtcacgatgccccacatcaaaacagtgatagattcaggagaacggatcatattaaacatgaaaccccacatcaattacgacagcagacgtgttcatttcttcgatgtcgtcacagtaagatactcagtgaatgaaatgattcaatcacggggtagagctggccgcacccaacctggccacttcattggaccagtgcctagtgatgacaaccaagtgagtgtgcaagatcagttattgatgagtttgatggttggtgttgaatgttccaattattgccatgcactctttgattacatatctgacaagactatatctcatgccaacgatttcatagctgtgaacaaagacagcactgacacaaatgtgttgtacgatgtagaaaatgccagatcatgggttgaaacagcgaaactggtgttaacgcaaaagaaactaggtaaagtacccgtctttgtggatgagtcactcacaactcagttttattacgatcagatggtcaggttgcttgaaaatgagggcacattgtctaacgttggagttttgaagacccaacgaaagcggcccacgccagttgccccagcaatgaacctggaattgataaaacgacacataacgcagaactgtggaaacagaatcaacgaaagtcagttgcgaaacaatgacaagaacatgttcatcatcaacatgaaaacgaaaccaatctcatggactgacgacacagccgggaaaaatttagctgacactgtcattgagatactaatcaatgattatctaactggactgaataccatgatagtcatgtacaagaagatgttgagattggaaaacatggatggtgcatcacaaggcagtcaacttactacaatggatgcttcaaagtggaagaaaaaaacactgttttcattcaagcctaacgacaaccaaccagtgttaattgttgacaagaccactaaagcggccactataatgacttacgggatgatgtcaaacatcagtgatggcacagcaatcataacaacaaacagagacttgtcacacatgctcgtgtcaataacacgggtgccagcgtcagtgactgtggctcggctcaaactagttatgtctcgctcccaactaataaccggcccgccaggatctggaaagacttacaaagcaataaacgattgcaagccagataagtttgtgtccaaacaatcgttaatgttggtgaaatatggctgggaaacccccaacactgtgcttgaatgctctaagttgggtatagatgagatcgcaatgttcaacgtctacgaattgttggtgatggctcaattagccgatgaatttgtcatgactggagacgtcaatcaaaaagtaatagatgacgacggtttgctaacagcacgaaacatggattcgtcgaagctatttgacatgctcaacctggcaaagaaaactgtgttgactcgaacgtggaggttcggtcatgacactttgaacctgctgaccaagataggacacaattaccaggctaacgacccagccaagagcgagatcatagcgagtcgcaacatacacgggaaatttggagacaagctgcggcaagccgtacatgaagccagccccaccctaatcgtttgcccgacaaatgacgtactgttatggttgaggcgtgaaggtatacatggcacagcagcaaccactacgagcagatctcaaggttttgagtcggaacgtgtgatgtatttgatgttagggcagcccaattcaacttacacacagtcagaactgtacgtggccttcacacgtcacacgaaagaactttacatcataactgacaacacttcacaagctttgttgcagtccaagggcatcagctacccagatttcacacattgggatgagtatgatccatccagggctggatgcgttaacattagcaaatggcgatcaggtctgctcggacaaattgagggcgcactgttaatgataccatcgaccattgacgatacaattgaaaaatggcgaagcgaatcaaatgaaacacatgaacgcggactagatccgtattacttcacggaaggccaggttaatgattacacttatgcactgtcatctatcgcgagcttcactaacgggacagtgtatgaaaggaataacgtcactgccagtgacctattgttggtggacacattgctagtccagctgagattgtccaggaggtccaacctgcaaccacatcaattatacaccagaatcaagcaaaagcaattaaagctaccaagcaacttgatgtttgaaatcaagtgtgaaaaaccaaatggcgggatttattacaaaagatacgtcatctctgagaacaacatgcgctacgttggcaccagtaaacactgcttcactggtaaaggcaacatctgctatacgtcatatgacacactcacatacacgcttggtgtcgctaaggatcgtgtacacttaaaggaaaggctggtaactttactggatgccatcaaagcttcatgtgtggcattgtacgacctgttatgtgaatactttgggttcaaatcgcatggagtctcgccaacagtgttggccgccagcatgatcgagagttcaaattacatgccacgagcatggttggatgcttcatcgttggcgatggcttgtgatggtcataagggcttgtatggcacatggcacaccaaggtcgaatcatttgtgacagctggaatgaacggcgctgaagcatacgaagtaatcaggcaagcggctgccactcaagggaaatttttgccgtcagcgccagtggacatgcatgaattgcatttaaatgctagagtggtaccatactccaaagcatcaaagttggactatttcctgaacgctgaaggcaaaccagtgcgtttagtcaacatgactctgagagaagcatactcagctctcaaagcaaacacttacgacccgtcaaattaccgctcgggctacgctgatgtgcgtgacataattatattgaggatggtaaacatgataaatgatgcgtccaacatccgtgaacaagtgagcctgctcgttgatgaggtgttactggtagttgatgagaaatttaaagacaggtgcgagatagttgacagtgatagattcggcacacggataggaaaatccatgcgtgccgtgatgattcacaagttattacgaaccgcaagaggatctaccctatacgcggttgatgaaaatgcgttcatagagagccaagtagatgaaagtcaagacaacgaagtcgatgaacgggcaggtggaatcaacgtaaaaatcaccgatttgttactcataattgactctataaaacaatgggtatgtgagtcggtgcttaaatggtgtgagtgggctgccgatgaagaggatggcaaatcagcagcctcttctggggaaacaatgttccacgacacgcaggaaataattgacagcgcgggtgatcgcaaaagagggatcgacttgttccaatgttgccaggggaatgtgaacatagggaaaggcacaaatgataaaatgcatgaaaacagcaatctggtgaactatgtagaactgatgctgaagtgtgacaattgtcctgaacgcaacaaaattgcagccctgactagactatttgaggttgaaggttgtgatgttaaatccaatctgaacttctcatcattcaagcccacatccggtatgttcaaaacagtgacggtcaatgaagagattaaacaagtgatagttaaagttgtgggattgccggaagtcaaaatgcaccagcttgccaacatgatagtcattgttgttgacaaagtggcattattggcagtcaagagcggtgaccattacactttgtactggtccgatcacaatgtgatgaccaatgagactttaatagaaaaagctatgaaagtgttgggtagcgtagcgggagggtccaatgatgtgatgaaattgttgagacgcagtgtcatagcgctcatcaagtatataagaatacgcaaggacatctttgtttggacgacaaaagccgcgctgggtgtatgccacacaatgacgctacactacaacaggtcagcgaaaagttgttatttcagcttgttgaatgataagtatttccaacgcaccctgaagttgaacagtcgaaataagttatggttgcaaggcaatgcacttgtctactcacgccggtcatcagccactgtgcttgattgccacaccatgatgttcggcgtctcagggccagacggtgtcactctccatctgtacgctggccgtgaggagaggttaaaagtgtttagtgagcatgtgcagcatgcgctaggcacagacaagaggttttacaacgctgggaagacagcagatggtttgaggaggttaggcatcaacattcaagccaacttgaacacaattgacaaagattcatggctggcaattgtgaaacaagcagcgcaaacgaaccctctagccaacctagccaacatttccaccgaaaacagtcacaaaagctacgaaaagatcatggatgatatcattgaacataagaggttgacagccatatccgagcaggccccaacaatattagctaccaagatggccatctgcattccctccggccacggaaagacaaccactgtgcaacgaattaaacgagaattaccacacatgaacgtatgggacatagacgacatactgacgacacccaacgttatacggatgtgggaatacaacgctgccttgctggaatacaaatccgcattcatgtcgtttgatgagacacatgagaagccatacttaatgttgtgccaccacccatcagttgtgcccaaaaatgttaaaaccctaataataataaacgacaaagctaacgtgcccgcagagcgaatatggtcatctcaaaacgtggagtcacttgtcaaacacagtggcgcgagcatttcacgagtcaacggttatgatgagctgtacaaatgcgtggtgaaatactatgcctccgggtgtgataaccagatcacaatgacagacaatggtgaaattgttgatgcaattgatgactttggtggttatagttttttccaaaacaacactggccccgacaccctcatgtttgcgcctgccgatggcaacatctcggtgcctaactttgcagaatcactagggtatcaaagagtctacaaaaccggaagacacgttggtgtgtcaagaccgacgatacaaaaactcaccacaagcacattcaatgcgataagtacacgcttacacggaatacaaaaattgagaactgaacatataacgtctgatgagtatttcaatgctctgtcaactctgttcaagggaggctgggaaaatcaaatggaagaattcagaaatgaaccaatcagcctgtcttatgatgattccttgaaatggcttatcaacaaaggtcacaaaattgaactcttatcaaacatggccgaaaacactacaataggtgaactgtcaactgatccaacgagagcaacagcacactttaaagttgagaacttactgaaagaagaggttaatgacatgttagaccaaaaaggaagggttattgtgtggaacaatcaaaacatcaacatgtttttgtgcccaatgatcaatgaatgcaagagacggctaaagatgttgctgaatgataaactagtcacatatgccgatggcatgacaatgacagacatcaataacaagttatccacaataaagaaaacaaagtacttagtcgaactagacttatctaagcaagacagacaaaccgacaggccaatattgaactttgagtataagttgctagcccgcttgggtcttgatggcgaaatagtcgcttacttacaacaactagatgaaggtttcacatacactacacccgaaaaaatcaaatcacgccggcctccaatcagatggactggaggagccatgacgtcgctaggcaacgaaatacgcaatttgttactgatagctgatttgataccagacaaaaacatagaacatatatggactttgggtgatgactcactaataatgaccaacactgaatttgatgagcaccaaacacagctgatctccacgcaacggcacaacgtcgtgtgcacattttcacagtctgaaaaagctgggctttttttacaactgattgtgtgctggatagatgacacatacatagccacacacaactttgatcgtttgcgtgaaaaattgacgtattcaccatatcctgtgtggagtgagtcatggaagtcaaaatatgccagtttcctgatgatgattggtgacacgccagatgtcagataccagctaatgcgccttgggtacaagagcttgccacctcttggcaccagttttgagcagcgattgtttgccaacgcaacgtatcacaatattgaaccagaagacattttactgataatcaatgatattatcgcatcatcgtccacggaatccactgaattgatactaccattgacaatgattgccccgcgcaacaaactactatcaggggaaataccactctatgaatatcaagaagtaaaagttaacacagcctcacaaataaaccagatacttgaggcagtgtcaggcaattattactaa

SEQ ID NO: 1257 - DNA, 10962 bp, Setosphaeria turcica endornavirus 2
  source 1..10962: mol_type = other DNA
atgtctcaatcacacacaacaacatcaatgccagcagttgagtctcctgctccattgattaaatcagagactcaaactaactttaagctcggcggcaccatgaaaccgcggagtgacgccatgcttggaggtgatggtgactgttggcgccagactttcgttggccgtaatgggtttgttagtaacagctcccttatgtactggtcggattacatggttgattttcacacttttggccagtgctataaacaagtggtggagtcaactaacatggaagagctatgggaatactactttgtgttcaccgtggattcatctggattgatgcatcaaattgagtttttggacgaatatgaggttgaagagttcattactagccacccacttaaagctaaagcggccaaatacttagtcagcgctcgtgacatctacagtaaagaaactaatgtgcatgtcgatttctttgagtatatatccgtccacgttagaggagagatcactaaagaaaagttaccgttcgatgttcttgtgtgggatggccccgagctgaccttagatgaatggatcctcttagcttgctacaatgaggatcctaagtgtatgaacgtgtatggagatacccagctaggagcagtcagcgtcttagagcaaataagtaaagattacaacattcctatgtctatgctccaaaacagccagttgggtaaacagctagttgataccgtgaacaaggtagccgctgcaacagttagtcaaagcgacaatagagttatagaagtcccagcaactattagcgatactgcgttcaatgaaatatctaatgaatttggtagatttaaagttgcaagggtcaatactggtagccacccacacccttaccaccatgcgtcacgcagagcagtgacgaagcttattgttagccagtaccccagaagtgatttgttatacgacgtcggtggtgatttcaattaccatattaaccaaaataacttccatgtgcacagcatttttaaaactggtaatccaactgatgcagctaggtacactaacttgacgaaaaaggcggtgaaggccgttacacaaaggcagtcacaaatgatcaacaaacaattgtctcgggacacagccgtggaatacgtcttgggcagtgtgctatcgactgacaacatgctatggtgtaataatgcagttcaagattgtaagcatatgtctaagaataaagcaacctttgccatgagtgtggatacgttgatgcacgtggagccagaagatctgttgtcgttttacatgtcgaataacgtgctagcagccacccatgcacttacgatacctaaggatttcgccttgtcagatagtggtaagctgaagtatgatgaaggagtgtggagcaaagaagacggaaatcttaatttagtgtttgcgggtgatagtacggtctattcccagaggattgagctagttgagcgctacttgtacgaaccaatactgctagcagataacctcttcatgtactcaagggtgcaaggttataaggctgcacacctaattatagaacactatatgttgccccgccacgtgttagaggaccagctgacgaaacatgcactatgggttaactatgattacgatcaactggtagtcagtatgccgaaaatcttattagacagacctactacgctactaggaaaggaagccatgactatggtacctgtcactctgaatgttaagttctatgagagattactgaatcgcatgatgcaaccctacacgtgggaggctttaaaagcgtatgcggctagttgcgtcgggcgatctttcgtatcttcaagtggtgttgaacaaatatggaatttgaacaacagggaggtaataaaccattgtgtcatagcttattggagtatgaaccgtcaagtagaagcactaaagcctctaataacgcgggccgaggagagagcccaacctacagggttctttcagcagatttggcaggtattgaaagtagttctcacagacattggaaacgagtttgatcccacgaacttgaaagaagtacaagaattagtcgagaacaattctaccgatgatttgcagcttgtccctatgtttacaaatattgccagacaagtagaaagtatctgtgtggctagccaactactgcggagtcataactgcatgaacgtcataggtaaatatgtgccgctggttagagaaggtgagtggtgcacagttgacagctggcgtgaggaacatgagtctagtgataggcgcactgttaatgaattagttattagtgacacgacaagcaaagtgagaaaagaagaatgtaagaatgatacgtgcccacacaatcactcgaagtcgcataggcatctggcatatgaggcttctgttatgccggttggggaatgcagttgttgcggtcaattaagcaatctattcaatgacaatttctgcatactttgcgccgggcatgaaatatgtgctggtcacaaagctacctgcaagcataatcataagcttatgcatgaagaatgttgcggcatggtccattgtaactgtaagcacgaatacaaatgtgagtgctgtggattgccgtcattgtcagtatactgccgtctatgcaagccaaacccaacccgggcgatggacaactctgcaatgtttaactttgcagaggataatgcaccagaggacttgaggcgtgacgcttacccagcgcataagcacatgggcatctcactaccacaagtaggcagactggataatgactttgacatcccagaagggagcaaggaacagtatgcggttacgcaggatggacccggcattacgaaaccaaaaactgaaccccttggttactacccaagtacagctgcccatacgataaggacgtgggcagtgttgcaattaaacatacccgaagccttagctaaaccaaagggaggccatattattgcacctattcttgaaaatatccgtgaggtcactgatcaacctatgtatgaatacaaccacaacgaacaaatgttactcggggtccgtgcacctagatttagctctagcgtaggtaagggcttcgggcctattgtgttgccaccgtataagtatgaccgttccaaccatgtggatgtgatcatcaactcactgggtgaatccgatgatgatggtacgtgcggagcgtcatctttacaccaggttactggtacgcccatagctaccattaaggagtggctgctagcttcggttggaacagaccagtggaactctgatgccgacctagccgcgtttgctgcagccacgcgcactaatttagtagtatgtacgaaagaaagagcgatgctatattgcaacaatcatagtgatgtatcctatgctataactactacagaaggctttgatggagcacaacattgggtaccatgtagcctaaaaatcaccatgttatacagcaatatagtcactagacagtatcagcagtacctatcacttatacggtacttggacacgcagggatcaaattttgaagattggagggcaatggctacaaccaacgtaccattatcagagattgctaatgcttataatttaagtaagagtgattggtcagatatcttacaaattttcaagggaggtgtgatagatggtaacggtgttacacatgtctccagccccttcacctcgttgcacataaaggactatgtagtgcgccagccatggggactaaaccaaatcttcgcacctgcaggctttgggaagtcaaccggacttataagtatgttcaatagcaggaagttgttagcgatggtcgtgccagctagatcaaatgtagctaggttggttcaaacaattaatgctagtggccatgtaactgtgggccgagctaacgcgcagtggtacccaagtgaccgcagtctaaagaaaccgacagatgtcaaaatgctcatatttacagttgactcattacacgccgccttgtgttcaaccgcaccggtcatgtcctatgttcaacttctcgcgggcagagacatttatatagacgaggctcattgtgtgacgcgtaaacttgtagaactatgtcattttttgggtgatagaattagagggttcgtgactgccactcccttagatggcatatcagacatccatagcaggcatactataacgaccaactgggtgacacctgaagcggctaattatctgatagaagatattatggaggaaggagtatcagagcacaccttggtagttttgccgacaaaatcaatggtccgtgaggcatcgaagaatagtgcaggagcgtgcgtatctttaacgtcagacacgttgccagaagttaacctgcaacacttgacacgagcagcagccactaacactgttatcagtggggcaacttttcccaaaattaaacgcgtgatagatagtggcaaacgtgtcatgctcaatatgctgccaactcctcgtgtctccaaatcggggactagtgtgtattttgatatagttaaatatgactacacgatgcaggaagcgctgcagtcgcgcggaagggtaggccgcacgcagcctggcgtattcgtggggccgctgcccactggcgtagcaacactatccacccaagatgcgctatgtttatcactgtcagtcggcataccatgctcgcccgagtgcaaccgcttatgggagggcataaccgtggaggcagtcgacacagtgcgggcgcaaatgccatacgtcttgccagagaatgaagatcagctcagccatgaggaggcctcaagggacatgtggttagctgtggcggatgacatacttagttttaaatcagcagggcggcagccagtgtttgctaattcatctgcgactctgttagatgcttataggtacatgctcagttatacgcagcagccaggcgatattatgaactacgggtcgtttaagacgttacatagagcaagcattgtaatgcccagcttggacacccgagtttactacgcaatacttaaaacgaggggacaacttgatgtagctaagaaaatacttgatattaaacaaagtgggtatgtagacagtctacaaacaaccatgcctgtatcatgggcggaggatgcagcggacataaacatacgtgatgtagtagaagaggtactgctgaatgagattattagcgtgattaacattttgatcacaaactacagagcagtacaacaacggcgtgtcggatttggttcacgcaatggggttcaagtggtcaaatatgaccaaaaacgtcataaggaggggaaactattttcttttaagtttggcacaaagcaaccagttgttatttttaccgatgacctatcgtccggcacgctgactgaagcggtacatcttaacaatgtggtagatggcacgacagtatctacggtcaataggaacgtctcgtatttgtttgattctttagcttcaatcccagaaattgtttctacgagcaggttgcgagagttggtgcgcaaatctacagtagtgagtggcccgcctggatcaggaaaaacccgccttatgatggatgagttgcggcctgatgtaatagtcagcaaacaatcaacaatgattagtaagtggtcttggcttccccccaacgccgtcaatgagaaatacaaatctattggaatagatgaatttggtatgtttacagtattagacttattaatgttgtcagacaagactgacaagttttactttagtggtgattttggccaaaagaaatctgatgagacgtctcttgagaccgctcgcaacctgggaagcgacatactccggaagttactattgactgcgcataacatagaattaaaggtaacgcggagatacggaatcaccacgttgaacctattgagcaaactgggccataactacaaaccatatgatgaaggaaagactgaagtcatagccgggcgcaaactgtatacacgatcggcagatttatttcgtaaagcattcagggatgcttctccaactttggttataacacctacaaatgatacactaatgtggctgcaagatcagcccatcaagggagtagaattcttgacgacaacccgtagtcaaggcacagaagcagagagggtcatgtacgtgatggtaggttgtgaccctagtgtatatgacactgaggagttgtatgtagcattcacaagacataccagagaactttatatattaactgatatcgatggccaacgagtgttagactcgctcaacatcaagttgagcccctatgaaaattgggatactactcaaatatacaatgccggcctcgtcaacacgggcctcatcgcctcgaccatattatcagcagtagtaggctgctcaatgggggtcgcctatagccgtatggcgtcatatgcaagctcttcccgcctgagtggtatcaaaggcactggagatttcacagggccgaacttcacttttgggctctccgctgcagtaacacaacacatgtatggaactataaagatgctagagcctgcgcgagtagaggactcagcaggctatgaatctatgatggccgctgctgcaacatatgatggggctaagtatgatatgcatggattcatcacctacttgctagccaacactcatcatgtagtgcctgacaacttaatatttcaagtagcacggccaacgcgcgccaacatggttgagtatgatatatacggtatcaatgaatgctgcccagtttacctaggtacaaacaacaagggagtagatgcaaatcagctaataatagtagatgacatttacgagtatgttgacttgagtgcggaccatagcgtctccatactgtccagattgtctgaattgctaggagctataaaagccaagtcagcgatattttatgcctatatacatgccatattagtgggaggcaacacaaccctggaaccaagcatgctagcaaagaaaattgtatcagaagagagctacttgccacggctatggatggatgcatcagcattagctatggtagttgacggagtggtcggcgtctatggtaaacacgtccagcttgcgtctagttacaggagcgcagggtacgatggcctcggagtttacaatttgatagtcaaagaggcaaccaaacaaggacaattcctgcccgcatatccagcagatctagttgagttgcatctaaatgccaaagtacaaccttatggcacttcagccactatgtttaggtcggcatcaggtgaacccgttgctacttcaactttaacactgcgagaagcattccacgcaatagagggaaacgaacatcacccagatgctgtgagagcaggtggttgtgagttaaggcacaacattatcgaaagcttagtggccatagtgaaaatggaaggggacatcagcctcttagttgacaaacttttagaaactagcctagtcatgatgcagacccgagtggaagcttccacagctatcacagataaagatagactggggaaaaagattggaaagatgatgaaagcttacatttatagcttagcaacaaagcatgcaggtgcgtttgactctaaaacggagaattacaccatatatgacatatcggatgatcctacttcagacgatgaccttagtaggtatggtggtatggatctcccgagtgtgctctctagtttaagattaatcaaggattgtctcaaaagctggatagtagattacctgctagccagctgtgaatgggcagcagatgaagaagacaaacgagatgactgcagcaatgccagtacagtattttatgatgcacccatgcctgaaggtgtaccggcagtgcggccggaatcaatcatatcattattcccgtgctgcaatcccaggatgtctcctgctcctgcggacacagacaaattacacgagaacagccgtctggtagagtatataaatatggtgcttaagtgtaaacaatgcagccaagaccacaaattgcagtgtgcgcggcgaaatttcgacgtgttagggactacagtgaactcaaaggtcaagttcaatgatttgaaagagtcaagggggatgtttagtgtagtgacacgtaatgatgagctacgcatgtgcaccataaaaatcacaggcataccgcaagtagacatacatgaactaggcccatattacatcattatagtggatgcagtagcgtgcatgttggagccaatcccgggcgggtacaaactgttatggagtgaccacaacctgatgaccaaccagaagatgttatccaccgcgatgaggttgatcaacaatattgcagggggtcggtctgatctggtcaagctactcaagcgaatgctaaaagaattgactaggtacatattaatgaagaaagatgtgatcgtctggaccactaaagcagccactggggtgtgccatacccaagtgcttagatacaagatgagcgccaaagctgcttatttcgcattactaaatgacaggtgcatacaacaattgctaagattaaataacaataaccgctgctggctgcaaggttcaacagtactgttatcaaggcggtcaaaagcaaacttgttagattgtcataccacgatgataggccacgaggatgataagggttacatgaatttcactctctatgcgggccgggagtcaagattgctaacatttaaagcaacagtagagcatgcgctgggtaggccgggtgatttggccaggtcgggtgaagacagcctaaatattttgcgtagagttggtataaacatatctaaactagatgatatcgatgctttagcttggttggatatagtcatgcaagccacgcgaaataacccgttgtccgcattaaccgagctatcgagtgacaatggttatagaagcatatcagagtacttaaaagagaggcagacacacgacgccttagtggctctgcagtcggtcacaagttatcaaattcaaaaaaaaatagcaatatgtataccttccgggcacgggaagacaaccacaaaacaagccctacaaagagagtttccgaacttgaaatgctatgatattgatgatatcgtgcctactgcctcagtggtaaggatggcaacttacagtggggctttggaggtgtacaaggaggcattcctccagtttgagcttgaacacaccacggaatgttatctcatgttgtgccatgatccttatgtagtacctggccacatagataccacaattgtaataaatctaggagcaaaagtgcctaaggagcgtgtctggtctgatactaacgtagctgcccttaaatctcacaaatataataatgtctctacgatcaaagtaaagaatcaccgggcactaaaggacctatgtatcaaactagcattaaatggcggtaaaccaaatataactctatgtgatggtagcgaattaatcgatatggttgatgacatcggcgggtacagcttttctatgaacaccacaggtccagattccatccttaggttgcccggggatggcaaattaaatgtcccatcactgccagagggcttggggtaccaacgatactacaaaacaggtccccatgtagggttgtctcggccaactatccataagatcgctactagcacatttaatgctgttagcacgaggttacacggtatcgtgaaattaagaacagaagatttcacagatgatgagtatttagctaaactatcaactatgttcgtaaaggattggcaagaccgtctgcgacagttcagcgaggagccaataggcttatcttatgatgacatgatacaatggttggtaaataagggccataaagtagagttactgcatggaatgattgatgatactaaatatatggacggtgcgattgacccacaacgcgcacaagcgcacttcaaagttgagaatttgctaaaagaagaagtaaatgatataatggatcaaacgggtaggattatagtatggaataaccagaatgttaacatgtacctgtgcccaatgataaatgagtgtaaaaaaagattaattacgctactaaacgaagacttggtgtcttatgctgatgggatgacaatggtcgatataaatgacaaactatcgcggataccgaggtcaaaatatttggtagagcttgatctatcaaaacaggacaggcagaccgatagagctatattagattttgagtggaacttattggctttattgggcttagatggtagggtagttcactacttaagaaaagtaggcgatggtttcaagtaccgcacaccggagggaatcacagccactaggccagcgttacactggtcaggggggccgatgacatcgttaggtaatgaaatcagaaacctgttacttttagctgatctagttgtaaataaagatattaaacatatattaacattaggcgacgactcactaatatttagtgatacagagtttgacagtgcacaggtaagtcttatagcggcgcagaggcataatgtagggtgcacgttcagccagtcatatgataccggtttgttcttgcaactgatcataggatgggtgggtgacaagtatgtggcaagccacaatttcttcaggctaagggaaaagatggcatactcgagctatcctagctggagcgctagctggaaagctaagtatgccagttttctgatgatgataggtgactctgatgctgtacgcgcgagactttctaagatgggttacaccgctatgccggctttaggctcggacattagttcaagaatacaactaaatgcccgacataataagacaacagaagaccacgtgctttcagttgtatctgatataattaatttggcatttgcagactgtgaagaaatcaagctaccgttaactatggtgttaccacgtaataagttgactcacggtgaggtcatattgcgagaatataaggaggttaccattgacatagtagaccgtcttaatgccgttatggaacagatgatctag

SEQ ID NO: 1258 - DNA, 3882 bp, Soybean leaf-associated endornavirus 1
  source 1..3882: mol_type = other DNA
atggaggaaaaagaaccaacaggaaaacttgctgaaatatcaacattacctgaggatttggaagaaaagcctgcagtggtgtgtgaggaatcaaatgaaatgggagactatgtaattgaccaaagtctaggtaaagaagaagataaagacattagggatcatgatgtggacgtaactagttcaaagcacatagtaccaggtgttgaaactaaccctgaacacgtaagcttaatgtataaaattgaatatgtagtggacaacattgtcagacaacgccccctctcagacgatggcaacttaaagtttatcagagagtcaggacattttgtcactgacactcctactaatataaactacacgttgaacgaggcacacaaagatggctctggctgtggattgaattctattatgacaaatttgctaagatatggacgccagctaaataaggacaaaatgatagagttaactggtcgtgtgactgctcacacagtgtctgatattgccatgtgttgcatgctcaaccgtgcgaatcttttgatggtatccaaatccaactctacacactggtacatatttgataaatcatggataacggttcaaattctacaaatggttgtaaagggggtcggacatgctgaaccggcagaattggactacgcagaacttagcaatctgtggaaaagcaagcgcaagtttgatgatgttatcaatgttaagaagattgtagttagccctacttgttcacgcataggtatgcctgtaatggcgaattcttacattacaaccaattgtttagaccacatccatttaaagaactacgatcaaattattagtaggcaatgtgtacaattgcgatcagacggtggtcgcttaaaattggaagataagtggggtgaattgctgtatagattaaccaacaagtcaataagtcactggaatgcaagagtgtccctgctcaacgtgagtaaggtcatatcaaggcatcgcaacccaatcaaagttatacacggagtgaagtaccaaaatggtgtggtgttaaacgaaaaacacagtgacaccatacgaggagggactttgatactcataataggtatgtatggggctgtcacaacaattgcatgtcctatcaaagagggaatttggctccctcttgaatgcaataggctagaaccattgtttttcctaagtttggggacgggaatatacgctgaaagagttatggaaaagaaagtaattttaaaaaccgaaaaagaggtgaggacgtttttaaataatgcgtccctcaacaggtgtcatgcttttggcatgttcacggatgtgacatcaacccaatcagccgaagccactcacctaatagtatcacagtttgacgacagacctcatcacatgtacaacgagcgtgacatattaactaagtattcggatgaccacataatatacgttggtacagatctaactagtgatgctataacttggatacgtacctcaggcaaacaccacagacgcagtttgataagtgggcggatggcaatagaagttcaaacacgagatgagcttttgcaagcgatactcaacgttttgccaccaagctggcagcgtgaaattgttgtgaccggtttagacggaggcgcatcaaccatcaactatgtggggttccataatgaaagtcatatgacagctggtgcatggacaggattctcagatattttaggcaagatgttgcaaaatacggagggttcaaatgataatgttgaaattaaatcagtaaattgggaaggcacaaaaaccgttaacaaggttgtggaacatctaacaagtctgcagttgaccgcctcctctgacttgacctggaatcttgttgctgggaagatgaatgattcaagatacgtcataactgttgtggactctccatctgttgtaatagaaaggctcaaaaacctacccaaattcaaaactgttagtccgatgctggcgatggcagatggtagtgtgttggtggtgccgtgtgggctaatactggagttggaccatgttaccggaggtcagagttattttcacgataacaccaaacatgatcacaatcccggaaatgacgcacaacaggaagagactggaaaagtgagagagcattgggacatgaaagatcagaccagcaaatctgctggacaaatcatgggtgcgcacgactggtggaatataaacaaatcaaaaactacagacacaaatcaacaattacagcaattggaatcactccaaaacatagaaggtttaggcgatttggaaattttgccactgcaaaactttaatatgcaggtaaatgagggtagttattgggactctaaaatttattttgaatacaaagaggatggtcaaaccctcacatcttgtgatatgaagttagacgaggacattacatcagaggtaatagaattttggttagaggacgatttgactgaccataatgtaatatatggaccaagagctacaatgacaatgtctcacgacggtacttacggtgctgttaaatcagttaaaaagactacactagttaggtatcccatttattcaagaccagtcatgacaaagatggccaatcaggaaataaacgcagtgacaggacgtattggttctgtaactgaagttcgaaagttttcgatcgatccaaagattgaaggccgacaatttgcagagacatacttcaagtctgattggggtgccatggtgcaccattaccggcaaaatccattaactttcgattctgagaaaacattagcatggatcagcactagatctgacagtttaaaaatagctaaagagttacaagaaatgcttgatgaaggtttagtggttcacggattagacagggtgaatgtccatctaaagttagaatcactgttgaaagatgagccaattacatcttacagggaacagcaagcccgaacaattgtgtggcaatcaaaggccatttgtgctatatttagtcccatatttatagaagcaaagaagagattcaaaactatactacatgaaaagttcatatactccgacggtttaacaccatctcaaattaatgacattttggccactagaccagcgccaaaattcttcttagaagatgatttaaccaagcaagatagacaaacagatcaacaattgttggattgtgagtttgagatatataggtacctaggtgtttcagaaatggtattatcttcatggaggtcggttcacaacaagtggaggtttaaaggtaaaacagtcaaaggtctgtttgatgcgcaacgtttaacaggtcaggtgactaccgctcttggaaacgtcattgtgaatttgttagtgcacaggagactggttcaagtcaatcaatccagtatacaaaccatgttggtgctgggtgatgacaatttgttattcatgagcaaattcatcgatgcaaaggagcttaggaggaccatagctgactattataacatgcagtctaaggcctttaactatgaaaaccacggaacgttttgttctttggtggcctacagatcaatcaatggtgtagcccaactaggtccagattacgttcgtctacgccgtaggtttgaggttaccaatggagtgtccgaagtgacggacgtcaacctagaaatgcggtcgatgagttattgcacgatgttgggagacatacccgaggctagacaaattgtacaagataaacagtggggtctgacgttaccaaattggtacgcacaggatatgcttttaccagccttatgtaacaaatataacatgtcattagagttggtgatagctaatctacaacagttgttaaacatgatccgcacacccaaagtataccaccactccgtagatgtgttggtcgaaaatcgttaa

SEQ ID NO: 1259 - DNA, 3087 bp, Staurastrum sebaldi endornavirus
  source 1..3087: mol_type = other DNA
ctaatgaatgatgtagtagaatttttcacattttgtaataacagaaaacatttaataattgtaatccaacaatcaaatgtacaaaaacatgcttgtctaggtgcaataaagaaattgcataatgaagtagtttatacaaaacaaatcaaagaagtgtctattagcaatctattatcaatattagattgtaaggtaaatagtttagaagaattgtcaaatgttaacaattggaaaaggttatttggaaaatcttggcatgataatctagtggctagaataaattcaagaaatgtagaaatcgtaaatcaaagaagatcagaaaatacatatacaataagagcttggtgtgatgacgtgatatcaaatgcaatggttaatgaaagtaatgtgagcccaagagtctgtgttattttaacagataatgtgtggaaagtaggtttgtatttaattcaagaaaatcttatggtaataactagtggtgcatttactagaaatgtgatcactgtaatggatgtaggtatcagaatgccgatcaagcctgtaccgaaaaagcaaattatgacattaacagataatttaaaattgagttatgtgttgaacactgaatcgttaacttacatgttgctcaaaactagtataacgtatagagttatgagtccaacagtggaagcagtaaataaactttatgtgtgttgttatgataatagaagtcatcattggggttcatataaagattattttaaactagctgacgaagtcataataagtgaacacgtaaagactgaatcaatacttaaagttcttgaagaaacatatgataaacctacaagaaaagttttgcacaattgcgaattgatgaacgcaatagagtgtcataacatagcagtcatgagccatcttgaacaaacgttaatatctaaaaatattaattatcacaaaacaggtgatactatcaaatcatatcaagaaattgataaatatttagaaacagacaatttgcatcagactgggccagcgtggttccataagaaagcaagtaaagaatgtgtaataacaactggtgatttgacgcgattggatccgacaaattcaggaataattgcacaaataattaaacctaaagatcttgtggagtgtagattaaaaccatttgaaatgcaccaacaacaaagttatttaaatacaggattggtcacaggaacagtaaatggaaagaaatgtgtaagttcaatttctagtggttatgtgttcacaataccatcagttggaggtaaagttacgcaacaatcaatgttaatgttagagcaacaacaatacaatatggatagagtagtgtggagagatgtaaaagatagaaatacaaaagattggtggcaattgcaaaaagtacaaaacaaagactttgtggtagaaccaatgcaagatgtacaagcatttacaatgttggtgatagaagataacaattttgatataattggtgagacagaaatgactgacaacatgcttaaagatacagaagttagttctttgaaaatagaaccatacatagcgccgtacactcaaaattttactgcagatgatttagaaccactgtatgatatgccagatctagctaccaggaacttgtgggacaaccctgacttaactgactggttaactatgtatgcaccagaaaatgcatgtaaaatacgtagtaaagaactaccacaaagaataattaagagttataaaacgactctaactaaatatcctataagagctagaccggtgttgactaaaatggtgtttgaagaaggtcgatcaatagttggtcggctaaaatcagtgcaagtaataaggaagcagactcctaatccaagagatttgttaaatgaatttgtagatgtgtattttacagctggtagtaaattgactgcggcaaaatggaggcaagatccattaacattcaatggacatgacgtcgcagcatggatagaagctgcaaaaggaggaccaaaagtgttaactgaagcaatcgaaatgttaagtggtgaaatattatgtaaaccattaaatgacgtcaacatacatttaaaattagagtcattgttaaaagaaggtaaagaagcaatacacaattggaggcaacaacaggcaagaatcatagtatggcaaagaaaagcagtgacagctttgtatgcaagaatgtttaatgaaataaaatcaagattaaaacagtgtttgaaacctaaatttgaatatgttgatggtttgcgtcctgatgaaatatcttcaaaagctaggttgttgaaaaatgtcaaaggtttctttgagaatgatctaactaaacaagatagacaaactgatgatccaataatagaagttgaaatgtgtatatatgcatggctaggactaagtccaatagtgttatcaagctggtattatatgcacaaaacttggagattcaaatctacacattacaggggttatggtgaaagtatgaggttgactggccaagctacaactgcattgggtaatgccataactaacatgcaagtgcattgtagatttgtaaaagaaaattataataatattggtttaatgttctttttaggtgatgacatgattggtctgatgactgaagtgccggatataaaaggtttaagaggatacatagcatcaagattcaatatgcaatcaaaagataattttaacaaaaactttggtggattttgtagtatgatagcatacaaaacgcaccagggtacttgtgaatttggaccagatatagtcaggttaaaattcagatatgaagtgacaaatggagtacatttaagtacacaggataatttactaatgagaacagcttcttatttgtgcatgttgggtaaaaatccgcatactgatttaataatcaaaaagttaaatctaccaataaagcctgtacattggtatagtgagagtgaatgtattactgcagcaagctataaatatgacatgacaccgcaacaagtagaaggttatagagatgttttacttaaaatgatggaaaatcaagaacaaactacacatgaatttagaatgttcactgccagttctaggtggtaa

SEQ ID NO: 1260 - DNA, 4848 bp, Volvox aureus endorna-like virus
  source 1..4848: mol_type = other DNA
atgattttccaccctctaggtggtgaacccgagactcttctacaatggtgcattagaggcacacatttaaaatcgcctgatgctaaattgttgaaacaagtaactgaagaatttcagtccatgttgcaagatatgatagccaacgtggaacctgtaatagatgaaacctttgatctaatagtggaaacaccattcacaggagttggcatccacttgtcagagaggtataaaattcgttatgtggaaagtactgcattcctatggcaccccgagcattggcctgattccaaagaatacaagatcatatcctccagtgttgtcaattgtatgatgtggtatatgaagcaaccaatactagatgcttggagaatatctatgggaatgaaaccacttggcctattgcgaatgccatatgccacgaccactttatacacatttgacgaatcattgcagccagttaaacatgattgtagtgtatatgctgtaggttatagtgcgtctagagtgaccagaaatcatggtagtgttccaaaagaattagaggattatgatttagcacactcgtttttaataggtttcggatccatgaatacacaaatgtgtgcgcagagaattattgcaatagttagagctttgaataactcccctaaattaagacaatattttgacaataatgcaattataataattatatttgacataactaaagttagtggcattgtactcaaagaactacgagacacaattgacaaaccatatgtcaagatttttaaatatatgcaatatgggtccattttgcctcacgtaccatatatgatacaccacggaggcagtggtgccacccacactgctctgcattgtggttgttatagtattatatggcctttctttggtgatcagtatgactggggaacgactcttgagagagaaaaattggggctcgaaataaaacccaatggggatctaaatcctatgatggattctattgaagccaatatgaaaacagtgaactctacggaaatagaaattgcgtatactaacaacatttctttcaatactttaccagttgtgtaccaatggttaaaaaaacatgttttgcgtgatggagcagtggaagggtgcaatgtgttgctcaaaatgataccaccagaatgcctaccagtaactggagatcaagctcaagaaaaagctaaagaattgtggggaaaccacatgatactagcatcgccattttatgtagcaaaacagatgtttgataacatgttccgtaatccaacagattacactaaaacggtagatattcatccgatatttggtcccacatttgttgatcctatatcaaatttacctttcaattttccaacagagttgggcatatatactatacgtgctccttactcagaagatgatgtggaatacaacccagaaactcagacatcatgtgtttatgcagtgttgcaagattttgccaattccaacggtattgtcttacgattacaagatgtacaaaagctagtagggatgggctcatgggttagagaatcttccataataccaacttgttgggcattgggtatagacattattattcataaaaatggggaatttaaattccacaatttccaaaattcaaggaatccggttttaatcggtatagaaaataggggtgatgttttacatgcagtcaggttaagtcataacatattgtataaactacacaactggatcaaaagcaacgtgggcacatcaatgcaacaactatcaaccataattaggccaagtatggaaaaaatttcagattcaataataggacccatgaatgacatgcataaaaccattgtgccattaaaagtgcaaaacttcactcaatttatgtgtagattggtcaccagaaaactagaagataaagatttggaaacggtaaaaactttgaatttgggtgttagcttgagagacattcaaactaagttagaattcaaaaatataaatcacacgattagaaaatccagaagagcgttgatatacacgccactaattactaggactaatggttggtttgcagaagaaagtccaggtcaattttatcgcatgtatctagttttaacaacgaccggagcagttccatgcttgttagtgccactgacaggtaatagtggatttttgtggagcttcacagcatgcccgtacccacttagtttgaatataattttaccaacacccatatgtatgagatccttaactcaacctacaccaccaaagccaataataattgccccagataaattatttaaaaaaataacagctttaaccaatgactgtgcaaggtactattatgacaaataccatacaaacattaaagttaaagatgaaacgtgtgatgaattatatattgctacctatgataatagggttcaccatcaatatgatgatggtgaatttctcaaagcgtggatagggaaaaacaaacctataaaatggtcaggcaaaatacccactaaagaaaacattgaaacaatgatgagtagaaatactctttatagattaacttatgataatgaagttgtgccggtagtagaatgcggtgacgaaatatctgcagcaatgttgtatcaatcttgtattgcagataaagcatacaaaccaaatgcaaacatcgtaaccctaaaaatgcaagaaatcatagctgacccattagaggttagtgaatacatagagagacatttcgaacaactagacccagtaaatggtaaatttaaatttggttcaatatacgatggcccggacactgtggtcggaaagcaatcagaagttcaagatagacttttcatgaatgaccctcatggtagaaactttttcgtactacttgggttgaactccgaaacagaatacacatataaagtcaggcctttaacttccacagaaattctacaatttccaagaactgcaggatatgctctattagactattttactgcaactgggacttatgtgactaggaataaaactgcatggataagattaggaccttgtgaagttagtgtagtgttggcagcaggtggcagcagggaagataccccattctggtatagggatgatactgtgtccaatgaagctctaaagcgaagcagatggtggggcaatatgctcccagactctaaaacaaaaattgacattgaaggtaattggaagaaaatagagcacagaaactttggagtggatgcaatggagttgatcaaattacatgacgttggagaagggcatattgcccacacatatggcctacccaatattaaatcagagctaatgatgatagaagggtactcggatgcttctgtgaactcagtagcagatatcacagctcagcgagatgatgtcacagtgcagactatgcatttttgggaccacacggatttactcgagtggaacacaaaagtgatgccgctaaacccaaaattcaagataaaacataaatcgttcataaatggaattggggaacaaacaagatacaccatccaacaatacccagattgtgctagacaactaataattaaagttgcaaatgcagaactaaacaccacagctaagagattaggttcgtcattagtgctgcggaaacaccccactgaaccagatgtagaagttagaagagtggcaaaagcgttttttaaacgtgactggcaagatatatcaaacaaattcaaacaaaaccctataacatacaatgatgatgatataaaactgtggttgagagaaagacctgattgcattaaaattgcagacgaattgcagcagttcttagaagagggttttcaaaccaatcctctaaatagagtgaaattacatatgaaaatggaatctttgcttaaagacgaacctaacaatcacccatacactcaggatcctagattgattgtgtggcaacagaaagccatagcagctatttacagcccaatatttttgaaagctaaagaacgtctaaagcaaatcttggcacatcatgtcatttatgctgatggattaactccaatagagttaggacgtagaattagaatggtacacaacaatgtgaggttctttgaagacgatttaagtaaacaagatagacaaactgacagggatatcatagacgttgagatgaagctatatgaaatcctaggcatagcaccacacgtgatatcagcttggcgggaagttcatgaaaagtggagatatcgtgggaaaacaataacaggcaattgggatcaacttagactgtcaggacaggcaactacagcaataggtaatttccttacgagcctaattatacatagtagaatcactgcaagcaacgaagagaacattattctcattttaggattaggcgacgatattttgatgcttgttataggttacatggacattactcaacatgtacaaataactagggacttttataatatggaagctaaaccattcttcaatgatcatcatggttccttctgcagcatgattgtttataaaacagatagtggttactgtgaaataggaccggatgtcgtgagattgcgacgtagatatgaagtgccaaattcagcagctaaacctacggatgaatcattgtccacaagagccatgtcatactgtatgatgcttggcgcaacaccagaggttctagatttggttactaagaaacattggccaatagctccagaaccatggtatgatatgcagaacaatcaaaatgctctagcaagaaagtatggcatgagtttaccacagatacaaaacgagtacaaatgccttcttgacatgatggataatccccagataactagcagacaatacaccttcttcacagaagggaattaa

SEQ ID NO: 1261 - protein, 4217 aa, Agaricus bisporus alphaendornavirus 1
MNSLAKVETYHTHTRGGGVPSKIRCYTSFKKTLTAIQRNKHCLGLQIDEDFPKTVKMSDPVDEYADRIKLIVGATGVTEVKHKYSHMVGGAVYFKEAMKISGLTREELLSEILQTVRSKFVCLFECHKQDDPINMVMELGNEILNNLPEDDDENIDSLCETISDLYLGEYNSYDYEEEEHEHCEDEMELLDDIYNDVAAYFEVSDMYDTPFTPEQCLELLKQFDEPITSSVDILKLHLNVKHLPKLVNVAYCANCEMEAILGHNHKNVLTNCICLNCYKELTIKPLGKIGSTVPDPMSLTEYLDNGNSISGAFENIAQEHDLRVVVQALSRLNAKLITLHEPIDNLTKSYLKKLAPELVFARGKGSLVGNTLLDNLTIGLTANLHNSGETTLLISEHPPPSPAYINWNRWPDSNQNYGFRNTVVSIDRIVAGFKLLSQLEVDCSVVFCLPTGIAGVTDYDTTTNIRFDRSNNSCLMTHDMRTEVHYINSTHKMLLFNANIMSINDKLFVISRQTYDSICVVTVRRVVTFKDWTIYNPDLRNTFTIPTITYNSALGLVGAPIVVIKTVKLHKELLTTLITRNLTGNVSAKELAEYGLGFAHSKYNLFDKSFSHYDVSAQMIMDHVFISVLLCTRATNKRRALLNSATPDLTGILNLIGYNSLGYLAATIKKMLDKNSTITALNDFFTNNNSVLTEYANDPVWDEIESWTHTATNENIQLITHYETPLGCCHTDIHNDSCGCCGLGNSTFRCTHCANTPAQLIETLNIVVEEKIEPSEQVKTRNEKIFDYNGIPARKAVLPCVELSDGSHEHTCVVCNNRYKHTHNHESSMHPLFVGDCPWCEPELTTKNKGEKIDYLDSNNNINKPVKTDANVPNKPITPGPAKLLNDVPEKTERTPESTVPETPWGNSNRLSVLYSQLSQATSVHFAELIYSKGARFVNLYTITNEKQSLILYCPFGTHVVTPQSFVVKDTMPVANSGLDTCAYDALNFFYQNRSTIEDFKAVSKTDNFWSNDEIISVAELKKLNVVVLSKQSGIIHKATNSDEFAVIVHNDFLDKPGAHWTPAKVSQISNCTITPVWTLNADLEQYNKMSNMKYKKHYDLVKLDIEQLLTVNLEIVKISTNTLELLRHAKPNIVVDVKHGHEFLQTTSLSQDSMELETVEIPVKFSALMNLLNDSSKTVLEHDKLTRHYNVALTNTIDELYEAEITEAIRIFLKCKFGANITNYHKMRVIKRFDDLIELENLDLPKLKVGDIIHLSHQSNMIAVPILKTRHNTLVVKITGVRVGVQLLFGITKESAGSMIRRIFGLLRVPKLSNKLFEQLSNTECVLAVPGAGKTYEILNSYNAGDCIIAMTSHNKSSIYRRAKEMKKIVNVKSLEKFLSEGKKYKTVYLDECTLVKPFDGVLVLTLCDKMYAYGDNNQIPFVDMSQSAGTREVKNITDVVKPEKIETKLLSRRFGPSLVSELSPLIPGIMCHPSVEHDTDIRFANYEKNSIQVTAEIENNVRNFKPNVVLVFFQAKKAFWLKRLHPIVVETVHSYQGNEADNVVVIQEPNESTFGICADKKYVISAASRAVKHLFWISIGMYQHNKGLSSRVYTLSPQRGGGIHKTFNAILDNITGVEMVSNTGTMIDADKFNASKSAYEDKYGVKVSLANNSDGQSLEVRKVGILMVRFDIVNGVATTSYDRLNMVTSKDLSDLNELLKPAVIQCDKFDTKFNTTIDSQQADIITFNMQLSALHSACASTQVTFYNDSTEVSIICRTTHNKFRISLSLNDDYCLKVQPMIIGRNFETHVHNVLTTLGYQDGSEEYPFSPAEPIKTTVINHTFNQIMNYLKTVVPDIIEQKMSDSKKFLNKICELTKENEMVLLHNHETGCYVVKTPINYKCVTPKCTYNTNAYNALMIFLNATSFKTSAMTILRLLTKSLIGSRTDNGIEGLMLPWHYHKTHATKAFKHYIDKSALLYMTSKIGEKRTIYVTEQNRDKIMNMVRDAGIDVNVNIHRFCPSLPLGVEIVGVLMVLSLDKSKQDRKIKIYGPHAGVLAANGFLNLQKVRDYHELSTYELHAVDDRMLSSVKNSVSEALKKKQFDNTNTEKDDAFIKALETPNEINYAALYGYDYNLITNSNLLTDLSEFETVKLITDLDSIEQCTEGSPTFVDNPMWQFTFKIPKILNALIQTGADENKLLSYDSTFVGLGAVVGDIEQGVSKQLYSQLAGFVLRDQITLTVPRLNSSMIDGEVNVTSQEITVSRKLFRDCGLRLLRENHDIDSLLKHVRTKQHATYYSDSGSYRQYKETPGAAMDLCLAVYLRYNNKFTELFDTIKWLQPETVKQEGIFELLLDNLGSSAKEMVLNVVSKLSGIAGMNLPQKDFIKTIWKVVRNMAFHQEDMFTETMSVMNVEERISTRRLLMRGTKQILMTSGAASIDEGANKVTLQSKYLHKLFSNMSTLMQSVSARHDPVTLMKDFTKPKSICCICIGSFGDITNHLQVANMAVHEGVKVSLIFPDSYLDQVRSIADSKVTLVPQRFSVDNHIKLLNELRTDNLEVLMTAYTEEKGALLYNDFDYKILKPDLVVGTCLTVQGPIIAKKFNANYLELNALPWNLVRAENKRFDSLKNVLYRGYRAMQLETIIKQYAIAGLQNPTPQDIISENYTSVNVIDPIFGLVAEKENHSVVGFLPFKYTNSKTILTTKTCVLTLGSMKTKQHANKLISVAKKLLSFGEHVTIVEGGVKFNKEFIDRSDKLQIVSNVDYTSQLVHCKLMLHHCGSGTTHTAMLAGLPQILLPVDFDQPQWAGALNKKGYGVYADELLNMELDDFTHWFNVTLEKTKNDSNKMIRHTATNIAHALKLTDNAITDSVTLTTDITIEEEAIIRDNIHKCNLHKCKPLETMSVLINTCCGERKRHCVIGETEECYIIVNSTHYPDHRIGWNRKQHIAIQPIMPIPVLRGHYEIATLGYHAHGMCEANSESPPNFYIKPNQVSEFNKSIDWIDLVRLHNGRWSNRGVFGIEPRTGICNCCHRSMWLLRSQNEKLCTSCHIQINWPQFTFTDSVSTTKTDNFKAKSRAGHIIFELSKLQESHVLLDPKGNSNCVPNCLRAVAKYSTKVSSTINNAFIDFEIGEFTSIEKIIQICRFMRVDIQVDHPNVKTGGRLLHNLEFDKTPKLRLLITGEREQHCTLTAAIKIPAAQKSITLIETENPCDDMNSLITTDLIDNADMDFNQILKTNLKTFRSTKYTDVIAKTTDGKLNIYGRRNLLVEANIVFRKFKSHEMYFGELPESFNRFEDRILCVPTRTGNVIGLVTRLNNTEKQLIVLTGQRPLPVVNYVIDASVSITKVKKHKKLIKNDTVTVGAFNEKSRRELSTIYPGISVNRNCQKVVISSLDTRNHHLYSEWNEMHTLLNRNTMGETLIELYGKLDGATVPTLVDSNLTQSICEQFSRTTRDQIFRFGWDQKPTVETWTRDKPTGLFLEEQGFTSPENERYVLDYEQFKDISELNDTETMNKLISCDLIGYISLKNCVKYFEIIKSTEDIVAFTGVDKNELNRELIDYDEASLTVTCGPIWKGGLPEITTMDSLNRTVFVRPEDIKESNGELTLVWFRSNCLILTTFVWKKKVRGGSYGQKQDLEDRKQNIDSDNNKLYWFNEEIEERLEHRGAESWIDKGSKPKNTQLPALAANEVELDALCSVFNDGMRGYDGKTFVASEPANKKFLMFTEPDTPNFVCHETGEGPEIGTEVMDIIDDVDLADHVTRLAPKTGIIKSHEVPGRIVTNTKTTMVKYPEMSKPVITKGVYQTFNAVSSRLHSVVKYRKHKMDVVSEFDRCANCYFVPNYQHVLDEFKNDPITYNVNNIVDWVNRRKNSSVVAAELIELMQTGWFNHPINSVKVHSKLESLLKEDEIGYQYGQQKIRIIVHQTYAICAIFADIFLQAKERFKQLLGEKCVYADGFTLEELAARMRLIKSDKPLWVFERDFTKQDRQTDEDLINFEMYVYKQLGVHDDVISFWRKTHENWFYKGTDLSGSLSWMRLTGQCTTALGNAITNMVVNSRTYQEYEQNIKIMLLLGDDNSMISDCEINVHNSRKISRDYYNMESKDFCKKHTGIFLRMILHQQQDGSMSVCPDFLRLRRRYEVTNGVHKMGDEELKLRGLSYLYMLGRNKVTEEAVTSLGYNDELLPTYYNFEEAVMAVATNNGMTNDAARNEFNLLIDMIKANKSYDVDYVVTSSQIR

SEQ ID NO: 1262 - protein, 3476 aa, Alphaendornavirus fimbriatae-1
MELLRHLDIRSKDLVCRKTKRHRLVFRDDGLKSHHPETRAMLNWMKNPKHVPTNRANATEQSQTSLERRNLARWMALHTKQNVRVGDNGDTKSIFKYMKSKGMGSIAWTQTWGYDTYQRTGLSQGSTRLMSQGLTEDPSMGYYSAPKELRESTFTQIGKMYLTGKHTGLQNARDAMMLAKWVTMDYRVHPSCPVYKWITNSQENPVAPIAYFFYYLEGNQKMRGALEKRGAIKPVSDSENDMFNLIFLKQVCKKIARWRDWKQSKSQQMAYINEQGDIAATTSVRWYTPEERIEGEVCLSLSEPSDAYYNDITQLNGSNLGCCKLCRHCGTLNIKQDLLYKPSIDVEENQWWSEEENYCAECHSYLDMPDQEWEDAHNVEDVVNYFISANVGSKVDEMGLMNYLDGVDWLGASNTKSNIKAHDLLIVNSALSRFNYTTVLTGPGVSHGNLLKLHDGFPHIQFADGAGEFVPGPTFRACKDAMVSLTELLTRRDQHIHVPGMDMVRNIINNDRFTTQLEKASVSLIDGTEESLNLHSLLSHQKHNDLFVILLSTSGPAEVVQGETWLANHAGTNLMVHAGSSRATNFTSIDSPGWSDRGMISYENSCFSSRVVITHGPLSLVHYSSVKSKKAVMMQWILSEGDKIKTMKVPTINNHALLTKAGLPIIEMEELTLHKALINSLLARAVAGKATYEELVEYGIAFARSRYSLQDETVSYRDVSFEQVSRHAWVAHCLMARAHAKTWTTSFMASAEGLMGLGLRSTVTVSNWLLKAAHSALPDNLSAALQEALNVNATQITRGRDSPVWDELDIWLNTRHAYISRGFNEQIEINACGHHNGGPCNCPITSHTCNCCGQPTATDSGRCLGCQPKNPSCTHKPTNVDFKGMVICYCCGLPFTQGCDNCPPMIAEVDSEDEYELRSKRSIKNPKTITKQERKPPSNKAQIVEEPALLTTQQPTTLVSSESKPRDYASAATPKSAKQPESVTQTKEELEDYLVAANREFTPEENIVLFSGKDCNTDLLYSGSNNKYAIYLHHCPMGEIVTMSNNFTLLGFDNTVQPGNQCGHYSFSICTDGIGKISDFNKVLGVAGPYSDQHLLRMARHYNLNIILYGGTFTTVQTMVPGEQHYTIQHIKDERFKDGHWRPCTLSVRKRWTDKLSIATMFNQQELDSLTSEALGEKKHYSTELLEPRDLYTASKHIKDCAGMLTSNVQSTLPQLTERKGQWYLSNGNTTDIARGLINQPVPGWALGALEPINFDINDKVKHLTVRGAVDSTADSVVNVDATLDGVINLACHDIIRTRLLPEQDVNSNLKSSVKIIDLPTRTLSSGILAINLEGTRLKQLDEIYVKEWKTIISVRVKMIEGTPFCITPMKSSLKKGVVRVAVPSSSVGSAWRVIIAALTTNVTQGHFDMTLKHMRGVSAIFGWGKSTTMENGRHEHNRGAMTRGAQTVLKGKLIESGNLATRAKPGAIVMSAEAASMRKVVTKRLIVDEASKLGPAQLLMMLTDKVEEVVLFGDHLQIGARDMNATPGERVATSCLDLCNNVEIYKHTRRLGAPLAEELKKIPALQDLTYDAKITNFSTTTTSKYDSTMINYLVQQYQIDTVLTHYQEMAAMLRHDLTNMVKEGTLVVSTIDSFQGQESERVLIVASPTANGTRHLVDDFEFNVSAASRARSYLHWWSINCHQESTPLHLRILGSMVGAGMPGGFPDEDGHDDMMDNHIIAEELNVNIATETMQTLEHVLRTKTKEFGCTYKLCNNPSNLEIHIIKNFGPLSTTMATYMWNHEAKTSTLSVSALAPISALESEALRRQMDKFMEKTNPQPDEEQEIAKTKKCCHSPSAAETYNEDIYFSTTTSYKLKNLAYLCQQFQSTGNKLGLYTNTGVLVELTSGGGCSSCGGITGRRVDGTMIIKLSSDYQRLGKRGITVGQDEDVLANSIIIMVGGYRGPTDAWINTVPIDDILRSRYVCAINIFERALTLGVQTVMDIAKADSPLTLENRYQNVNSQHLSEGERLKNSLLTSCGLDNNIHEWFDMSNKLMGHMKTDHLPWVYRTTDGSFTLAFTPKTGSLLQRHEPSDYRQIILDCIRAHIDKTSIIKEVQAIISDIHSKRKVGARINGLLQPISQHKDAGDEIYKTLQNFAAKAELGKLKHMPKPVFMTRMGMNMMGDAINEMHPKLAVQEHNMTHGHDPLGQARETAANACRRRDRNNVDILTQRPSVYFVNSWFNSNLMTPNDEDLHKHWFDSEMGLCYNVLSNIAGRIGAREKIDETSSAMKIAVESYKNQSMQPFISKEKQHKALEMNDVWCTMTPGEIISKIIDHGCKEATGWFSYDFDGTHQALNLPGKGMARSQCLTGQDIPSVLLDSHFEMITTGRVNKTKHEEHTLLIEKQSTFSGVHLVKLMVDNTRDKFYHIDHQVVGRSTINVTIPALHPNIVKGITTGQPLLTKKHCVMDKKLLEAMIMRRARLSCSFDDLLEYGRSQMMTRYYTTRGVQDKFSLTTEKCHDMAVAAWCAGGALTHDITSYKNYNLEKEFTPQLLETIKQVCWSNVNYSADKLAGVASMAMTMFGGKLSEFDLGDLVKSLDITNTMGTATEILQSMQLWKVNLHSGHGKIVKIANAPLNVVEQETKRSGPVLIAGMGTYGDVAIMRQVKKMVEQAGLSTVLAVPKTYCSPSEVSLNFDAIEAANEARMLIENPLKLIKQMLNGKRFMFADDVVDKLSDVESPSLIITNAVSPQVHMYAKANNIPTIMLNGMIMRGHLFPSLEKYDLTVPDCATKTALSMVWSMAVREQQEYHNSEGKNTKGWESHATTTILSHPLFMQIESDSPTVKNAGYLGYNDTEGLQEEDVPTHILFTMGSMRGKAVSTLMERVSHVSKTLHMQLLIIEGAEPVPARLRMEEHVIVRGRTPLESVTPHSRFAITHGGTGTIATLICEKVPTILVPTIGDQFVWASHYANAQLATSMSIESNIKEIEKACRSIMLSPVMRRLQGIRHLTTLERSMEHGRKVIFQALLEQGLEVKEMVSANTQQRQNKKPKPMPVVQPMTKIVPKHVRQMAFDLVHDLEPLDQDLNMACCGQKQTNDTIIGQSEENDCFITFNHKEKLISWVTRKHEVSWRQMSFHRQLGHPWVSTLNNHSHGRVLFAGVKLKWLRSIVLPANQPVDISITEWERLSNRESRKFNDNGALEKITKKGVCSYCKRTRHMMHDGLCKNCSSDKNFLQPGAEELIFSLGMSDEELPVMAKTHGFVAETLPADSHEEEDLDLTGMLAPTTPSHNLGIMTDFHHTPVPPGVYKTGPILHTILYDPVGTNDTCVLDCLKFSLDINRAAAGFDNIRSFITAPGGVNQGEIVGLFLACGLNLVLHTDTETTAYIMDSKLPLAKVKLVDGTRISHLLVVESNIRWICKERITAQQQDHKVYDITEPIHTITGADIKTINDASELMQSILDPDNNSEASRNLTARLKMSNYKSVNKEETTAWL

SEQ ID NO: 1263 - protein, 1775 aa, Alphaendornavirus fimbriatae-2
MARAHANVWTTAFLASANGAVGLGMRTAVTVSNWLLKSIERVIPSEFHSTLSSLDSMNLTAINRGQESAVWDELDVWLSTKKVQLSKGFNHQLSLSDCNHHKTKGCNQPKTGETCSCCQMDTADQSGRCKCCYPKRPSCTHKPDNVNFDGEMVCYCCGLPFIETCKACPPLVSEGVKEDVSVSNQGELVAKSHPNIGGNLSTGWPDPRGGKQHNHKCKTCGNVVTHEHQFTTLSHVHPSSMCPVCYPNDRAETHHVTASSEPTPREYAAAERKEEKRVAETSADKRKREALVKANAIFSPSENLVLFGKDKCPPDVLSSASSDKWSIYLNYTPTGETGCTSNHFLLNGFDAEVQPGDQCGFHALNTCTKGMIKLSDFNKVLQRTGPYTDRQLIRMAAYYHINILIFGDVFSMVVTNSPGEPHYTIQHIKNKEFPEGHWRPCQLSLKDRWTDKLTTSPMFSISELDSLCSEIMGANTHYSTNLMDEATLLKCATHIKHCEDLMQSKVTAQLPQVYESDSDWWITNSKYDNMATGEIKIAVPGWAKSAIEPLTKTGREMADHLSMAAKVNVSPEGLTDVDSLLHNAITMACHDIMRVRLLAELEVSEQLKASFKIHELSTRKLSTGLLAINLSGTKLKPMDEVYIKELGAVLSIRVKYLKDVPYCVTPIKNSVGTGNIKVLVPNSSAGSAWRTIKAALTCNINQGKFNDVLRSMEGTSAVFGWGKSTRIAQEADNDTTVVAMTRGAVEVLKDKLLKLNKQPTVVKAGTRVMSAESASQSKVMTKTLIIDEASKLTTDQLLLMLSDKVKTVKLYGDYLQIGARDMSQTPGTRVVSSCLEICQQVDVRKHTHRVGQPLAGELAKIPQLIDLTCDEDKVTKFGTTTTATYDSNMSRFLVEQYQIDTVLTHYQEGAAMLKRDLQDKIDDGSLRVSTIDSFQGQESNNVMVVAMPTVRGTRGLIDDFEFNISAASRGKSYLHWWSINCHQESTSLHLRIMGSTIGSGLPGAYPDEEAIRLMEVDGFTEDGQPFMVGKEVRDSLEDSIHNQASRYGCKADISSDQDHFRVEIRKKIGFMNTVMATYQWTFNTASSVMSVSPFAPISSEQADKLQSTLDSQLKCMSAPSSHVDHKVKSTKCCHAESATEKHAEYLFANPLSSWKLRNLAYICQQFQAAGTKLVLYTEKGHAVTISSGGGCSTCGALSFRNEARSANHENILRLPENGQQRNDHQPYEDAIANSCLLMVGHFRGPTTEVMVSDSVDHLLDSKRLMVMNLMERGLTLTGQVVNSSLKRENNTNLENRYIDANTKHIEKGKQLIRQALAANNIDPWYVDEFVLTNKPVGHMSCDHLPWVYQAKTGNLSIAYNGKRASDFNPAPWQSLILESIIEKLNTNTVMGEFSKFLASMVDNRKVGARIAGLLEPVSAHKDAGDEIYRALQNFAAKSEMLKLKHTPPPIFMTKKGMEIIGDTINSLHPKLAVQEHNMTHGQDALGQARETLAAAARRRDRNAVNVITQRPTVYFVNSWFNSTLISPEETSYHKHWFDQDLGICYNVLSNITSRVSSKSEQGELRPIIQRAVQAYKSPTMHPVISEQISHMVTDMNDTWSIMTPSEIADHIKASNGEYVLGWYGFNPEASRQKVNVPGRGWATVQATTGQDIPTIMLDTYLNHMETGVTIKVPGTKDRIMIEKQCSLAGVHLVKIHLNQSLTNFYHVDNNEIGTSTVTVDIPTINSNLIRGITNKVPYFRRRQPRWTRSCSKQGSCAEHEQIVNLTTCWSTEDPK

SEQ ID NO: 1264 - protein, 1929 aa, Alphaendornavirus fimbriatae-3
MRRVMNNGTDVFSDGPLAAVMTYVTSILMDEYGTCHIEPDSAITVADSASLGPFSYTVPSWCEQSRLTWATSSTIARKMLERFRSRVPASDVRHGRLADLERSLAFREGTYGTVSGDVQRVVTPHVLSLAPNDLSRHYSNYAGKTYSFVTRDIVRTAHGSGFVLPHSDRLFLINKHQLASIEDGRMIAGTDLRWHTIDNFEGLRLLRLSKQRLWARNTTQHLADATVKMPTINITLPELARTGELFTHSTLRINKNFMTNLRKRLLLKPTDREDLYAYARTMMQTAVYMTTGAASKRVCTARDVEGMVHLALIMNSYEQVAFSGTKIGSYADAELKDNMIALLARLCDDGKRNVDAVVAQLSSMVPHVSDLARSYRDIAAVFNDIMRHLSSVDGDFMAGDEMITPRGSATMRPRIKHLQRVNLNDKHGAIAGKDEFAGTRPSDNFYSDLIEDPAAANVERFARLGRGDAHCEPRWTHALMGSGKFAVGRDWLAFKNTHWVSSKYLNQPALSTTQQRFLSTLSNAVDKLEHADSYHLYSLCDGIASRSPATAGPGRNLHVNIGASGSYDPLGFVSILRSDPGRFGACARVIVAHMLVTRRQGCTVYIRSGRPGPHVYWAEAALAETDDERLSMGNTVALPFTTFGPFLDGMRIVSPLQNMDGFVKNNMNYYWLYGIDEADHTVFNIKTTLTWERATFPYSNWFFHDDRENVMHGIDAVTVATRAPGALTDELVIEGTRNPENMGSLIKLHDRAHSGPTRSGDSPSALASAWAAGGKAPRGDVNKKWLPYRTTNRGTGCIEVYRGTASPGTVVYDPHTDGQCVWHCFAHYARHAADWDDARIVQAYQSLAPKTFETVQDIAKYGVAMGFSTSVTTPDGEYYSVQIDGSPSLCLHVKYTMGTYFHCTIVEQHTITEQRRQREDTIDVAGLSAAAGNARLAQRLIRDGLSGRAGGDVANAIEATRGPIWPRAVVIAQNPDLRTKGRDGTDEFMQVSGAQPASVIAIPGSEGLDFKVAFEHAGRVWIEHPYTDVYIALSLRCSVDSLVARNARDDKPALVDVSGTTDAQPSFINHTSKTNAAPELQHHVVDSAGRPLIVVDFDNTNHHGSAAHDDLAARGFDALILPGEHMDEQTCDELATQGMLIAGVTGGKLRYRTCTINDDLAAAVYYDSGVHHEQRPTKAALEAYNQGWAQTRVGNRYGLGPACNDDACPCNQVADSLNATGRARLELGRAESRALLACTGETSFDLTHRTDTHTRLQWVFQLNTGDSECEIYEYAADKWMSTFDVFAVGSGHMLVSEFAAHVNSKAYYDYKTGRTTKTERAPEPRPNMNDRVDAVKHALGDSGSAHTISAEAPTRREYEYIEHMDASVELLTDEYHERIAAKTMDYWDNNTALLPTVAPTPHDAVKFNVKEHDIELKTVGKAILTPYPSHAQPNYTKRYHAMQQAAVDLFGKSFKLRQVEHDPEADARELVRTYFTRSVPSTEIITFDARATAEWIAERPGADNIRRELDELLDEGWATHPINRVNVHIKLESRLKDKPHNAADIGMPATISEQRVRLIVWQPKAMTALFAPIFHEAKKRLKACLRRDVIYTDGMSPPELSAVLSTYDGSGALFVEDDLEKQDRQTDMTLIKTEMLIYKWLGVDPRVVDMWQRVHEHWSAKGYSISFDGHASRQTGQATTSIGNTIVNMLVHMRFVKTLGQNLVIMMCLGDDNLMVCRGHVTENMVSQNSARHFNMKSKPSVSKTHGGFLRMIVTTRSNGTLMCGPDFIRLRRKYEVTNGVSEATVENLQARGGQLLRHGRPRWAIPESFPPWRIRQPAVVVRTTQDHSHDGREIRHHARRGRGRDRPTFQLRARPRRQGSHNRDVCRQSVKKCMSECKEMNVVEVAPRMRSWPSRKSARLPSSSSSPSSGKSQQRCLSPECKEMHVRV

SEQ ID NO: 1265 - protein, 6200 aa, Alphaendornavirus sp.
MRAAIMNASTIEEQITLERKLTRTKTAYKRMMKKKDKDQSEKISEMDIITNFKEAIETAKANMAAAEMRKQREEQLRLLDLSDNSADLVVPAGTCWDCIPFIDFNLATSSASNTQMSAMTKAGRVNIPKGPIGIDKLLAIVEYYKEQVESGAIDIPDFATDPEDMYAIDTSGAVWHLYRDGYNNYTDLVEYDEDGEEIKMEEDDGTQTMKGLSTVPFLELHAELLKKKKEKEDRDKKFSEVNVGGDKDCWKTLFMIDEECDYTRTLEEVTMLLDEALKARQQGANVDRSITKDPETGLCYICFEEECDCDEPEEYDPDGDAKGFMIGISWTRTGNLHIEGYRYMSSAQPLLNSVAFYDLKKAMMENDEKFFKAITGWKKDFRIESTIEVGAKDGDLRVNSIAAAFNIGDVPETNTWKALIDSHDLRAAALALAKIDHAVYHLPGVLQNVEIEKMVDANKGGWLIGANLVCDNTLGPCFSTTCLPEVAGMHMARQMFKGKGACIYNSPDWLDCNEYLPVLRKGKDALAFFTRVSLNNANITKLAKDHKNIVMVVPNVHNEMPAHFTNESGTFDVRRQNGNVVVVRTDMTEVISHNQSLLSAVNTCEYVVVGQKMFQVTIFGKTEHDTVLMLNQINIDDTMLENVFKFDYNSSVREFNILMPLLDSLTYNVFPVFKMRKVAIDGDLLRTICAHNLQRGDLNFRTLLTRCVGYAHRRYHLKHNIKAVTHLTNDQLLDHAYLAAVMVRRMYLTRRWLVDLTDRPRWVEVATKHGMGAAQLALQAMKEGSSTYRNFQEWADKISTTSRTNLHDFTDQTVMNEVEAWMFAGFAHEARVHSVGNDKVKILCEHHKHDCVHKGANACACCGKPTDDARCSCCMNAMCQYNHKCGHICDGTHFGPETCDCCGQDSEQIKCRFCLSPELNPEYEYEDGVFATKVKHAGGAVTQPTNEVGKPRPITTKDGVKAIQPVSPAKNMGNGKHCHECAKCGGYYTHVHRFTSELHPLFEGDCPHCEGNTTSRKTDQDGNETGHTGXAETKVTERNPNSDPTDKEIEEKEIKVTGQSANVIALINMGYSLTEISAIRGNAIAWSELTDWRQEGALKLPMIPIGTQSVDVEVKDFKKITDIPDTETCGYEVLNYINPNVKLAMAIVIAQKESLFTNKDIIKIAEHYGMNIVLVSEGEIVISRNGDQSWYDCILATTPGHWEVGSCSITWKACPKISKVDGVKLNTLEHVRKTASRTALSTDEANLAAEISMNADNYHASEQRRFHIKGNFFTNNKECKHQPYLGLVAVKHNGLLPNNVAELLTAETPDTYRKALATEWKHHTKTEVGYEIDMRMLNYAMGISACHNLGKGLNSTEMVANVTVPNHEASDYVTFDLPPDAKWMAGDMVKLVSSNFEAFHTVIPVKTGNRAQARFNLPKTGARYKMLYPKSSYFNNGYGLATLIGIKAEIDNGPMEAIDSECTMGVPGSGKTSIILAKAKRGDLIVTATSGNKNGVRSRLLDRAAVDRPEVLGPQQIIEKAAFERKKYNNIFVDECTMFTAVEYRTLELLTHNQKNIMLYGDDSQIGAVTMTPLNQIGSATELQRFVKPDNMKPYMNKSSRMGIEACAIASKVTGKEIISTTGRHTVVKTYNASDPGAITAQIIKDVEHIDVILCFTRNTQKALAKHGIKVLCERVHGFQGREAKKIIVLQEKPTPGQDVSTNPRYTYSAFTRASEEVHWVSLGHNNNMSIESRLGKRGKVEGFVGDSFRAKVKEFIKVKFGKDKVELSASELAKSKVLDATMADDGEHLDRKIKDKLQVYAAKHYNATVTYETDEKQRTIINISRYGLLALSLLWDGKTLETITDKFGVMDKNKKEAIMRALDEREEDIDWKHVGQMSSSRNDCMLIALMIADNCRMLGTTFTAYADDKKFTIKTTVTSIGEQVVIECDDPEYNCTMCITDQDGVYLANVDEQIIEHAIYMVEEAITTLVGKYEHPANICRAMKYQRKVASNKEILAQLSAMLGLSTMDIRNHKTNKYHKSAKKANITTLMRYETLKLLEYPDLREMFIVRDRKTDAAGWLTAEGKYIDSSEWELASAYASVVLIKALKKTWWYKVMKFKESMIDKLKVGAINVTVKQMEEHFAEESNTATYIANRMGKVKAMMLKREPKPVTVVPGASEAWSDLLTIAMPQTGVQLTSVPCMVDTNNHMATQIAIKMLPQWKKLMNIYCVEPEATLEAGQYEWRTVKPINHRAGAEYMKNMLRLDRLAHDIKNANVANVSNDEARTKLEALIQAAEDHLEGKAEVWVSNFHSNIKGDLLAMYDAMNVTSKDTYNDEIVQLVNGNKTYVALPTCAYKNHMGNSVTEVSNGMAKIINNEYGLVATVPVNIMEAMEKGVYKWKNEEYTMDVMGTNMAVTIWKIAKGKRDTLYSPMPYVTPQTMVEVKIPVITDNLVDTLIKAKTKETRVLMVDRRLYRSLSLRMMREGTTFEDLLVAARTMLHGVIYSPGGTAWKNKASTSILMDTATAVYIIITKKVRNMEAAFRMVSDSMSTDYWVRTKGNFKNMAQGLLANVQRVLGMTLTENQLVDVLKASDSQSLRSAAEYLDGWSIRVDEYTRYVRLGDEEWRSSPLEDVPKITEFALNNLLHWKSLVANVPDRELRIQHPPMKIKITKDKFNAMNEANVAQLELAIKTVSQATYAEPTWIDCTQLSATDSSIYTMIMACVASCQPVGLRVRLRGSNRDWTVSGHDHDWRIMIITSDQVEVTVKNTGEDDIVVTDNDASILHEFINEVWEQKKDNMGINLTAKSTSIVLDTLATVRLAKDKLQQVAAVVLGMEFDASAQNYNQYEEQFNKFNARNLLSYKMLTPHTIPEQPIIVGASNREGQIGWIMAGRFFTLDQRDEVEAAVMISSAASLRDSWVYRLAELITNAKEFINVKAMGANLKPWSDHAAEDTHTSQYVSNKVSQLKARLLKFEQKPVTLTPNANKEWTTLVELTMSTCGYNWTSHPNLLDSNAAAAEQVALRMLTNTENLKLYSVNCDATLLSGMYKAMVLQPTNEANKALYRMTLPSLLAACDRIMGSNTEKLTDGPTKENLLSLVEAATNQKAGIDVWTGKYNPDVEHANLVINNSAIDYSSRDRYNDELFSMVDKNRKVKVIINRMDTHDTPHSNKYEVRGGMTRVINTTYNTVSHYSVEMQQIAETGRTTWHGKQYRGDIVASNNALEIWELEEGPRNEYYSPINTQALNGLQKIEVPNITTNVFDMLAKGEVMRKRIIYVDKRLYRSLALRAMRDGTTYEDLLVAARTQLHGVIYSPGSVVWKHITDSSILMDTAMVAHWKGKRLLKNAGEAVRLMADSLSENIGTAAMGRVKDIIHGLSGHVTKLLGLNMNWNQLAAVLTNSDVEMLTRIGTEMEKWAVRVDEYSREIVGVTKSIRPDTKVTSAITGFAVSNLLNIRSLVTPVSSKALRQYNPKQRKIIKKEINRIIMLRGALDANVAWWLKDDNLEPRLNNLLANLAVGGKGTGRLSSSPVMQGALIEALNRHDNEAVYRILDASEGNLDHDKQGQLEIIKKLQTYNGTANQDNLSTADSITTERAEGLLGMPEFRLTRKDVARLESVMKDADDMESRDYSTLWSVFEAVTKEHGVEFKRTHTMSKNFSKMRVCIVATGSRGDIRPSHNLAKQLSLDGAEVSLLCPRESLKESEIYRINYVYGNYDVDGELQKWHKLMEWTPESIDIIMRDDLDNNWLRQLQTDKLETGYDLIIGSPVTPMGLALAYIYNTHYIDFCPMPLRNVQGNIIERVYARLLSREYVLLHEKAINNLTQELIGKPADIPALLTMNRPYAFAADPQLTAPQPGEILQRAVGYWGGKALDETYDKIDFLTPDTQVVITMGSMRDEEVARRLTANMEADNVVVLAKPGSPLCDHALARGIKVYSGDYNLGALPPHLTVVHHGGAGTTAEITRSKCWQVIVPVAFDQKAWAQTIEERGLGKWIKANRDISKEDVAFRTPNPIAIKTAVPEMAANFTKLLAENTGAAWVWPVTGSIFATSDTGKPYAWDRLIGTNAATEADADNQGIYYDTEPRKLTVSFDPLGTEPGETGTCGVRAINYLKKEGKDKIKARLTKLGTTFDEVNSEGMTMDQVINYCLDAEINPVICTERSCKAIIAHAAWNTIYLWWQNQGHIVVIEPIKTPTTRMVIGMTNDRYNAKDKIQCTLTGHDAYSWPNKTSDSYHEDLCIDQDQLEEEIRRVLANAPSSSGPGDRANLWSKQTKKTIQDRIKSNFASARRRTHPWIRARNIKIWSKGVAVMEEVPEGKLVAFHNDGNDYLLAISVGRDEDGWTYYITSKGPQHGISPSGIILDANTYLTAGIDSSVAIVPIRAANNLTNILLEKGYPICANFDAKEAERVLIGHHDGVPHHWNKNLFNTYGPNDILFGLDEVANPELYDRLKNNIGPLKFAVWKDTVYRNLVLQVHKYPELYNQQCRARWPGADDTFGVSWPEDQVSAELETEINNLTSPVYTEQGYYKFNLPISIHNPYPAHMYHEMMNKWRADLSTEQSEPTSMWHLEPTVDYSGLIQIGSWYFRIVQETDTPEENKEVKEHTTLQTGTPFWYTIDEADLEDGQDLPIPNDSTQLVITKSKDVSKGQRTDKSHEELWLQVRGDVIQNEHYLFLKCSSVEEMLAWMQADYVPADCENNVSCGPPRYQNSTGWVSNNGLVRYKDGPWSDWRLDLSKEQWDGMMSAEPPTGYANIRDVQEVLGMTSEQVEILVEQTSCEVFLFKPRITAYNHDTQFYAESDWFEGLNVYGKCAQLKLASNGHMESETLDVNFPVGTIPYRKDEINAYRNAEGTLMHHLTSKIKLDRSDEINVQGNKWERTAELILERFLKPNHTHIVITATSEWNPEEQKKLNESEHKANTLYLNLTYDDTYQQGWCNVVIPKSATNNVKSLRQARTILFYIPKFNPDIMVTVVGGREDLTEAAKGIDADYPKTKGVLKHKPGNLGCQLYMNNCSGMLGTLNHASHYWKQDMDLTSHIYGTDEWLASECAANFTTLTRLPVDTVSSPQDWAAYIRQPTLAIRPKWLSSDQDKLVDDIIRRYGLKNEDDSKAAAVKILKWGKTSTTTEPLSCEQATVDISDITCAVVPKVTGANGSNYNVTMGGLELTDSDKYLTISAVPHGNDTPLFIMPGCNTQVMPGYTTVTVGMGHQTNREVRVNTHDPVACLAVIHALAATAYKKAIVQIEGYWPEPTDTINRVSVMDYPTIQPVYIGTKLTAMIYTNPSPKNFAMGKHLVTTKFDAFNELAEREYTTLHRYDAPLRTSWPRNPWLPTKGGRVWHEAELSHTLGKANMNDAKKIVKVDEIPKNGEAGHISATDIINELTSAMVTIPKGPLRDKMIAEMAIWDNVPPDASFGATSINKTASEKVIAAVALTKNLKAGENIVYYHKPRGEFLVMRKSKHMQYEQDDDQDIESGLWFNTEEVETKGIEEADKHGVKQGYVKHATGMDERTSNTSKQDQLMPWAIAVPEAEARAALEGIPNRSTYVLHRDIITPQEQARLDNEEEIPRLNGQLKAISRRVEPGKILLTWGPKTTDQKHTIFRGAMMLAYNKFDEPNSETRDALREGPEADRLILVNTVEEMRERLEGMRREMHDKGITEKTVVLQDLPLTEFLTNQLHDYEVGSNVGSGNPNAKHAYMPITHPGFTGVGESTTEKPQREIVTDEIIAMYENSDLSDLVRIQAPLNRGEGKGFVGTAMPINVITSRKTALTEYPVASRPVLTHMAYSTENAVFNVLGSQITYRKSPLDTKHEINMFIKTYGGPDTRELLLKWKKEPLSFDIERIQEWLAGRTGVQEIDRELQQILAEGLFNQPINKLNVHNKLESLLKSAPITNFAQQQVRTIVWQQKGYAALFSHVFLQAKARLKEFLGPKFLYADGLTPQQLSNRCRLERCLGFLEDDLTKQDRQTDEDTINCEMRIYTEVLGVHQDVVQLWRSAHDHWFFKGDGIKGRLNMMRHTGQATTAIGNVLVNLLVHRRMADRLGESLKLMMVLGDDNLTLSDKAIDPRKLRVEIRDLWNMESKAEFSEKSGVFLRMMACKDTNNRVQLGPDYVRLRNRFEFTNGQHMISDETIEARALSYACMLGPLPSVMAAIDTCSHKVEPVAWYDPVPQVEAVGDYYFKEVPATLRAGMVHNEINLLCKMMRERRTHEYSFEHYTTVQKLR

SEQ ID NO: 1266 - protein, 4508 aa, Basella alba alphaendornavirus 1
MGYGVVKPDGVPFSWFEGRVGHSYIKPLAEGESRYNKFSTFNPSEPVLTFTMDKEPNDCSEDLIKLFKKEMIKYGGFDEYCKLNSKNRPDAISTITRTSAGFSIEPCGLVPVKQCQICGMVNVYSHYEGHPAKIHYSLGHYDKTKEKEHNELLSEINNKGEVTSVPWRCCGCFSDLNIGVIGATYKLVLVLKVVWNFCFVTAGELDNLLTMGFGDMFPDLEPTSKEKLVANDCRIVSEYFFHLRRSIVPCGYDVDSSVLSNLNEQVGGIYFKKQMLYNSIKPELVTELSVCNISLWKIISEHNVASVGDMLPHPGVRNYHQWFYDDSLFPLFPMDVCASREYCNDDKEFAIFGSLGFSRFSLSFVLEKVKKQRSVNYIVPRVQNRSTLQDGTGSVRFDDGKVLMYLDGNPTPLIFQAETLVALTDYDILIHDQHYYVITTIKDLNLVSMKTITGPYSSITVVPEYKSHFISDKTITLPLPSLERFLGGWNNLSYKPQSFLINAKLFKYLCVRNLSGKVEHQTLREYAVGFALKRFMVHNKVVADLQVMYEDIDIHIILSRICMMIIRKNYQHNFEFSEFLKKLAPVKGLLGSICNSMTTIAIQIFGEFLSFATGISLEQFVELLKYSHISSWITGLCKADFWNDLLLLADDVTLQHTKILSIDNSQVDLSSYYEPICKHHHDCSHDEPLKENRCACCGLQITDDVFCECCYPVQGQDYKYDKLVIPKPDVEIEKIEEATVERAREILEEILKQSDKFMKQDSVFQFGKETPVIKPVDDKMAVQIGEESSSTSIVDEEPEQTEASFPIPRIISMPETRDAPLTITETRARFKEKQSESKEKLSVPGVQYVKPVKGIKALVENLTVEAQIQGEAMYVNMLGLEFTKHVLSMVEYENNRNIEPDCRYYMPHILCGVTMISSMDFSVVKSWNLPNTDVNTCGMDAYNFVTNSNHSLSEFRQLCEMEESFSDWGLQLCCQKLESNLIIYSKTHITILRYDATSDYYGCIEFLEPIPPSSIGHFRPCSLKRMARSSIYLCVDDPNSMSDRELCLSSIRGKKERLHSQIEVTPEENLLCELTRKINVLDTPMSKISNNPRMIKIDNCWYITNNEETRQNNPDANFIHVKVPTELLDMADTIRAALEGRFDLVHLPEMMHSSEELPHNNTEWVKQEIYEILRSCRRVEEAAITLTQSEIKVIGGILARPYFSKTEIVPDHKDHFKLRLHDKVPIRLEGATRQVFSIIGFTEKGYIINHPLTFPTRGTMMELKESWGSNLRRLIGLFKPMISIKEFRDIVSRATCVLGPAGYGKSTMISKEAKPGDLCVAMTSVSVNSLKQKIKSKNVMIYTIEKAKYKHLSTSRTLYVDECIMVDWKSVLQLCEPSTTLKLFGARNQIGYLDMSKTPGVRFNQDLIKYLREDQIKVTNVTYRIGKPLLDFLEPLEKGWKNPTNKVTTYNITNLDSNEINTLKKIVLISKPDVVITMYNSNKTLIDKTLTGLDVQVVTTHSFQGQEVKRSMVVLKADVTGAWNLNSDPNYLNSALTRASEHVEIVLFGFPLSHVSSVDQLLSRTAGQLPDILTEIEQFDKKLMTNNEDETLKTLTLRNMHKLSDDQISILNSLNITMEGINIKYLRDNNAVICKASLYSKEIAKIINNGGSVIIEANDLIKNKIMSNLDRSIDAKYLDKLNLKNTHQFVEIMLSVKSANKLRELLWIVDKFDDGIMECYLMGREIKFTKTKGCPLFSGLKIEDENNQFIIGDGWYDLFRREIGYKIKDIDGPVNTVMAWLDIKIDGLMIPEVDSIGWLDVLQGMNTSTQWQMQERLTTISMWLVNSITMDSTRKCYPNNNANLSINNKLSRLIGATPNRTKHQSVIKHQNLIVKKKHWLFITKFHLGNGNGCVMTVNQKATDDKFREFVVECIQDLKYEPTPTLVAGFSLNDLHIPNLNMPLTRHRVLGTQVNKIIMDQMVEIQALTSRSPDDVIRLRKKDFDVYSKLLKDKYTTLSVTQANYDMLISNAETMFEQLIINQMVPNFCKPGTLIVYCGNNPLCVAVKKKYELKLRIPKLNDPSRVEYDRQLPGYLNLYNEWISNQTDKKIKTFSWDETTHANLMIAGTNLISITEPDLKHLLDRCDELVGWVPLDIVDDSKIHQFDKSKRLLSFKDSTFCRPARNNLHIDIHSCKPLFIDNETNTYVEMVVKNEFSGMAMLSLKKTAIPCDKLVYRCMGTRQDLHGYETIKVPWLNLDILDVVSTKKLLTFRYFRVNRIMMRNMLLRLMTGQDSEDSLLAYARTLESTQIISQTSITSMYNSDLPTLLNTAWVALYIHKDNLSKFKHIIRLIDNSQDSKYLIERLTLLIPSLLNLSSLMSDITEGLIKTLVEKFITYVKFDTEWREVLQFNLELTWLKYTPIRHHKIYNLGDDDTQTQPDPPSDDSDNSDSPDSEDYSDESRTEQDYYSAEDDPYESDQRSDENEDLISKTSKSDSMVMERSMETASITDNIHTEESLSDTESPAQVDRPLETILSNVSVHSNINDSDTSPSLTEVTIESPISTKGEKTDSSSEILPGPEQAVVVGEIINQETRYPEVEDNTKIEELEVKTMTEEDMLKVVETHLNVDLSDREYIWNGIKDCKQFDGNQSLTMKHVIDYLRITVLTKPSDTKAAALDFPGMKRQPPLTVNSIDGKYGSIPKILWCYWEKDSVTYLLHLCLKTWHHYNSDYRIIVLTRKTMENMVGKTTWNYISNFIVQFRADWVRLYILKTYGGVWLDISSIFKDSLNPIVNYAANHPSCVFQPSIWNRNEPNRAFENWLIVCNNQNKLITKWFDIVDDMAKNAGNCEEEIIKYLINKYGKVGERACSTVSRIHLFYFRVYICESIAMQLTCTEDIACMFKDEGIVSLWQSRSIREWARLYDIYFKDSMDQHQVDLPMYKLIGDERKPIERWLEEGREVSPDSIIGQLIQLTIQIPYDVQSVKLQISTPKKTVEEHLAIAHYSGVNSILMCIGSAGDLLPIIKLYDLLELKNYKPILITHKDLKSIIGDRRLHPLTMTSDLLMRVANQLLHEKDPRGMATGFDLTKSIVQETCNYLSEYHKPMDLYICNPLFPNLKDIQEQLKNRWIITNPFPYGWTAGRNPERSWFDKMITILGDCSLQLSDIIRRQNVKLNLSEPAYQLTVNKLLTCSHTLHREDQPEIIQTGPMSLSGYSSLGGGHQTLHNRKYCLINFSSCLNNVKPEDVMTVCDVIMKCGFHIIFNDAKTSISPFGILGKYLTANMGMIMVKNGLNILDYVGKTEFCITHGGIGTLHELIVAGIIPFIYPTIADQYEWANLVNEKKIGTKLDHESLESDLEYGISSLGMFKQNLLLVTSEFKISIDWFWLNIQQKGKRDVRIVSKTMMEMQRPSLQLSHKVVTLNKFSDVPIGIYNISGNSIKIHYSPKSNGFCVKQCLEHILGESIRGNNFITSNPQVGDLLTDVVDRSKIIPGFLALGLNIVTLQDNGIGKLYKLYQGTVIGIYLKETMSVFHCEVIDDFVVDEIIPMTSPPKTTPMNLDIFELLKKEGHYKLSYDTLCNPPLLYKKEGNKSYSNYLSRISMNGMASLHTRGSYSTLDLTLNRDRNIYYGSSYAQNSPLHTSLVTSRLGWCTCNCIIKNGTAYIFSDIELPAKVVMINLHLHPLSSIPSKHLIHKHKLINLNKETRTLGSVQGSLYRTDKLPELVNENYTVIVGHYDNRSHHNTDELNILLNASHINFQTEQHCELKMFIPSYNNCMDRLCIHERKLTYCTELPTVFSAKVISALSGLEQIGNRLMHSAPLTSDIRNMLLANFKVSTPSMLLKHEYGTQLDNATVEAIRKFLTEPLTDNVLIRNIEHGLQTLDIRRNYHIRRGILEKLQLSQLNENIFVSILNNMYLPWCDMMIIAESIGGKKETSSTLVGPKIDNDERMSWRLDVGSESTTNNWWSLNVNTNTSSKVIPPMTDVMAMNELYIHDIEPVYVDLGNEQHQDKVEVDCFISPYTSIYTGSHLEPLLDFPDPIVMDLWNNTDLTDWLTLYSPINEGKVFSREVPGIVIQIEKITMTKYPIVSRPVLTKLCFEEGRSIIGRLKSVATIRRNEPNPYHAVIELCETYFKHDWRSMVSNYRNNRILIDPKDVENWIKANKDCPKIVIEMLETLSGGFLNKHINDVNVHLKLESLYKPDPINVWRQQQARIIVWQRKSICAIYSSAFKAIKNNLKACLDYKVVYADGLRPDELSARARLCNNVAGFFENDLTKQDRQTDRPLLEVEMMLYDILGLHPKVISSWKEMHEEWRFKSEHYWGTGTSMRLTGQATTAIGNCITNLQVHQQFVKDNWDSLELALFLGDDMCMVFSEQPNIKDLKYNIAVNYNMQSKESWNEAFGNFCSMLLSPLTNKRCELCPDVVRLKFRYEVTNGVHEMNDLNNLMRKASYIMMLGQTPWTKEIVKDLDLPIQPVEWYSYEDMIKTVGAKYEMNEYQVEGYLHNLLNLLKSKEYYSHKFRMFSNRTGTKLY

SEQ ID NO: 1267 - protein, 2014 aa, Beijing alphaendornavirus 3
VDNMDYSTLQGWLVCHGGAGTLSALWQGAATAVVFPIAFDQPYWCQYNRQHLYVGEELEDLVNLQPLTGPRYSINDTITAINEVFDNLSKPLPALKMMTPKGTFNAFNRKVIADYTTIKAGLVCIKPSEKVIYDNSIDLRMDNTCVVDSIMHAAGLKTVADKEVALRDLTKNCVSLGLTNIHNTPQSYSTSVHLAALFGFNYAETHPGETTITVDITLPVKECVLLNVQGNHVNLLGVYNITDLTLVKSINRGESNAVRSGLTMDYCEHGKLSALTKFDGCIHSEHDDTSIVKQIIKHLVDGTVPEMHRMQTASRSVYVNKTRSNWSEMTGRINATQLKYCYEFTARCYNENSVPTSGALIWVLTSNGDYCKGILLKNTPGSYLILALTTDPMPYIINGNYTIAVKNQGKKMTRGATEVLDQVALGLLSGKGLNFKLWRGRVDEQLAKLVVGDYNFVPHHYDSNNTRFEGVVDKLVNVEGNSIGNQLRPIGLNAVYSRYNVKSSEIIWYFEITKDGENFYNTTMVKDTFTPKITNGDRDTLDLINEIYNEVVKPSAGPGLMELDDCFIIQNDSLMTTDKDIIPGKLRNKKVSLMHNDDIDWNIAVSLYREQQMHSGVKYKILQKPLYEKIIWCHRGLWVIEENVENAEMDYVPSCIEDLAKDGFSTIKVMENADLTINLRQFNTDKYAGSVIQCDNENQLRQCVYEAILNLKSAQHKPVGCIDEFGNIITSSSGVLIDITRRSLTILDEQHQNYITLKIHDLPLDIKGEHIYDEKYHNLFHNSYVVHNKKKVYLVIKSIERCISAILTNSDSKLTQEGAQWFKLTYNAEYLRAKLEIDDSTMVDVVSGHRSELVGVDMSGNHNRWIENTSGNSDFIEQAKIENVYRAEETNTYRNTAYGHNLHHLHDPHKFEDLNIEMQQFIEQLALFIDSLPANQSVICSANVEWENNTGLIGINLTDKFVHMNNWITVVVPGLGQRYRMLAMLRLIPWVYCKNNRLIRVVNGRGNGSAKCPYSSLGVTMSRNDEFTSLVMLWDAVADAGILGKEKLKYEQFLATIGDVYGADELFISKCDVYKCCINYGEGTKKLDCLLNHDQSKCAYIVMENGKPIIQPNASWLGYDNYSNVLIDKLAAEMGLINAIYVCNYLYSKVFKLGLTTPHTLQSRWLERRNNSNAHGELNTTTHNDTYTTVDNKGTFHTLDEDMVDSECTGRRRAHYNTDCYTKPIFYEELKQLTYPIVGVDGKVKLMNIAEIKLMMYSNTDGPLKETNSCLMPNSLLKLESSARGRAYWFEGDVMTTENEISDPRDYDGKVQFISEKPLNIIGAIAMPVGTGKTWLTKKYPNLFVDHDAINKPRQHEIDKLIRENNFDQVLSIHKSAKIPKGKVLLTWSMHSVPDNCVYGGAIYRSHKPHFDKLSPKKKEMALLGEIGVRMEEKVIEVGNDLELESEAIKLARRILNNEIIDVSRVRDHNIESFFDVTFKDATNFSVSDGAWSAGLYMPHMPVEELVSNLDNPFNEITPIQVIDFHEDTDLFDNARVIMPSSQAQIASYPLRSFETANKLHTSNKISLTKYPMISRPVLTKHVFGELNAASLRMENLQWFEKGEFDVSKELDGIIKNCFRSEAPEIIGNYNPITYNTRWTREWLAHRPGYTEIDKELEKMEAEGLNMHDLNRVNVHQKLESLTKQTKPINRYIEQIVRIIVWQAKTIAAIFAPIFLEAKRRLKELLKQNIIYADGLRPDELSEYLKQIPDDDYYYIEDDGDKQDKRTTWRMLNVEMGIYKNFLKVDENVVSLWTKCHWMWKYKGQYLRGMSDGMRQTGQATTAIGNVLTNITVHWRMWRDLGKDHVTSLILGDDNIIISKRPVDVQKHLQFSKKHFNMVQVVDQNKAGGKFLRMVVCGNGDYLQCGPDYVRLRNRFEYTNGQPHEWDLAEVLEARAKSYLMMVGKNHESVEINKTKGWDLPLKYYHDETATINATAALYGATKDAVLSDRARLLNYIRDPTPYKHQWEHWTYRP

SEQ ID NO: 1268 - protein, 434 aa, Beijing sediment alphaendornavirus 1
AQFNAVSTRLASTTEYRTIHLNNDEEIKLFYNAYGRQDWELILDNFRSHNIMWDINKTKEWLNNHHNFKVALDETKTLLKQGWGDFQLEKVTVHNKVESVTKDKLQTGKTFKLTDTSVRIIVWQRYCIAAVFSPIFLEAKARLKTILKPKIHYVDGMTATTVAKLVRTIKGKCVFFEDDLSKQDKQTDAEMISLEMGIYKTLGVNSDIIDFWKRTHSTWRYKGLQLHGKQKAMRLTGQVTTALGNVITNLNCHKRLILRNENYIELALFLGDDIMLINNNYLDTDNLKSEIKQHYNMLSKDSQANVGQFISFLFCNSDNGIIMCPDLVRLRDKFVSPGLKQNDISRETRILSYLTLIGNTNHTNKIAENLGYKVELPTWQNIWSSCAACAWRYDMSIEAVYETYLQLMYMLTSKPITIEFTHWISKPLLRNRKK

SEQ ID NO: 1269 - protein, 474 aa, Beijing sediment alphaendornavirus 2
VTKTKYPTRGRVAMTKEANALYNAFSTRHGDKQNLKTRKLNIPKEVRRVMRVYFDRNRMWKLIHFQKNPLYIHRGRLLDWLSERPDGLSVLNELQEAIEQGFEGNPINSMKVHAKVEALLKADPASFPEEVRARLIIWQKKGICALYSPVFKEAKVRLKAILKKEFMYADGKTMDELSAYTRGFTGVTHLFDSDLTAQDRQTPHDVLDVEFEIYKILGVSAAVLQSWRHVHNNWHYKGFDVSGELDEMRLTGQATTALGNLIVNLLVHAKFVEYNIKQHVFSLLLGDDHISGFKHKPVVTFYRNTIEKNYNMVAKYEIRENVSIFCRLMVYKTADGHMEVGPDFIRLRDKFETTHGTAAVSKMNLEMRSMSYCMVLGKTPQTMELIKTKNWPIEVLNWYSFSDCLNACANYYDISQFEVLDDYSNLLKMMKDDRYYTHNVTVITSTPYGKPKSYAQPYLGKKIILAPPASGKSY

SEQ ID NO: 1270 - protein, 4884 aa, Bell pepper alphaendornavirus
MTTKLSRPFALRLLGGSRPPKTQILHGCTGNSIPMKKLNKKNDCSARKAFRQSKFKFKISKNKTICPAVMAHRLEEELEFIQFGPEECVPDLNKVDIRTIRNMMLLFDQDHCHLDVTTEDVVKYLQQSQLQSTEPFYGGPSKMYYANCRPMLLPPSKQDGTKTEAASKLLTGLIKKFGGSVINMVLLDCVNNYNMTPHVYKIGNSYGYKAMELPNVEAAMTCSCCGITNLVWLLDETEGLTKSRCGVCLQPLLVRTMMPECIMWGMLEVIDITQLRVGAIELNNAEITLQLDGQPPLAPATLSKLIDQDLRNLRSVMSRAMSKTIYVPNGLTEYQKKELAIVVPAYKLLPMSGTPNPHAMLAAERRICAVTMGDKVKKGKKILDIGTRINLTGNDSWHGMGPCLDWRDVERYHNRPLTANTCDHTVKECGCMDGQNPLLISVDAMYDIDPTDVISLMHRTGTNQLFFCLSTAEVDFENTNGKLAHGQGEWMRHDDKLITVLRGDDRPYVNNWKLTKLWSTADLIQAGHVELSVQTVKTIGNHIIRVATLVPDGMDCLRTRQVNSQNLTHLNITVPMIDVESWLNVLGPPKMCHKTMKLDLALYRALYSRNLTGGLSFEKLIEFGLGYAHAKYTTKTTTISHQHVTADDVRMHALLACAATRRKFAWVSSALKLNNNSNVFGLDPIEVTKLLSLDLAGTLITDLWRKMLPDGFIKARVDDLVTQVTNWINDSFWDTLDSLSGPSKVFTPNIYVWPTTGHETVLNNERICYHHQQWCDHPIALDNLCECCRLVTSLPNSSRCECCLKDTTAHSCEHKCQGGHEMVPTELTQNCKCCKLNSLTNPCKCCSKKLAKFPDSQQPIGSEIYAQPQVDMAKKINNYKYQGLEKITSFPTHRTTTERPTEISAERLVPQFEPTPTASSIIQLWKTQLGDRAMSSKPINETQQHLTATVTDTNGNAEGNEETAPKALTSAAPDDNEFKTAILELTGLTDFSYVSNLRYGYTEAVASQLALPNEPNPENRIGMSELKYFPMGMHQHHPDLLVAIHTQSVGGEGLCAFYALEHACGIKLSLDHMQSALNCKQQFSTLQIIKYGNMLGYNVAVLTEETIITGKVDPTTDHFVCILHTIEAETGAPHWQPCNVVQTADLESTPCYKGLFTQSNINKQLSLISAEVQGVELTKELIKIVLSLIKRAVPKLSQLKFGRVEMTLHNEDGSWKLSNNRINRHDPGCGLFNFSIDERHTDLVESVCHETVPLQVLDDLESPLNVGTMHNCDVDELRVSLLRNTVLQLRQTWLQAKGIEPRSEDAWVKVFALTHKIGRDTRLLMLQHTKVKSGDVISVDTMFGIQDRVIWKFNDGFQCQDWLPPTIGTQTIKIYINKRSFKSGLIKLMTLSRPHVDFTQFKQLVLTSTCVIGPAGSGKSTMIANNWVDGTIAIAKTTSAVKNLQLKIGGPKNLVMSHEKYAFTQTPIHDLVIDECSMFTWFDLYFSLTELPRTLTMYGDPHQISTIDTFMLGGERILDNITDYVVEKTNLRSTFRYGASVCALLSPLVGELSSKAKHDTKVVDVNLALWDNVELKATINEHNPDVVLTHHNITKQRLMALCPNKRVETIHSFQSMEANSVLIVQYNEGGNSKIYMDKKYAISAITRAKLKVVWVSVEVSNRMTLLDKLRGTELDIIGGGKQPAVTEHSDTLHQTLLDTLQGGINEEETKQPVFPQQSEETSTSYHEMAEVEHQHMSKILNEKVVTTADIETILDGYNMNKQPLLIYNGWADFVEKWSQTLPSNKKMEVREDVGTIKIWLYSLEIIVTVDENREYYSLQLNSPMWLSPMKSIVMEKYRAGLNDEWCKHALGKKYSTVLAKLRPVHRDWFKSVLHWQPEFEVPTTTKIAETKNNQNLKRIVDVDSEGDEWEDALSEDLPEDTQAALEDAALSNLEMNRILTDRQLRNKYPSLANLNYSQIGALLNPAAPMLYPMKSTSLIALVYATLPNVKLTTVVKELDNGFEVTMSTVAQLIVIIAVTGDGLLLEVKGGTLKQKIQEAILELRVRSYNDLAPYAGVKQNGRTLTAPQTQLIQQWYPWLTNLEKRQTSDTAIEVHDLIENGRFDVSGKMNDLLNSMRELRWILKEQGVETSNDIEYVCKVCDDQCMYSDEEIGLESGCVMLETYLGPTATRILRLCSEWAVLQSDIGKQFVVNIRGEQVMIISFGGCSLCSGLKFVCNNQEIMRISPQRTMGNVRRLRLNHSAYPAVLNSIMISMHMNNMAVGNCMNDEPIYLDLLSNVDNALKCPWYELGMLFEKISIAPKYLWRLIADRESQSACKMFEDENNNLLSEIANHIPNIEIPMIVNTPGHRSLNGRPLGVRYKGIKFAIIKFNGKYSCDNQLMAARFAWSYIPTNVMIERYFFVRLNSWPWVIAKLVTLNGKLANIGLGHDFDMPVNSLNLPLSYHESNNTAVNRFLVEKRGEAVLSTMKKTYHIVFVSKTQLQNYGPMLQRDCEGMPIEEQGCDTIDQGFDMLTEQICLKYFYNGLSRGEVSQMITDYPYLSILTSSWANFCTPPDKKHAFRYYQNLTDCNNMMEKMEHAYGVGKQPAETSKEKEGSTRQDIMECVNLQLTEGSGPWYTNQTQDTAEIVTNNVLMGLVQCRLSPCEIAEMMTKAKKKCAHLIMPQMIEQNNQLFGVASEDDYQYKFWYHNSSHLTIINKQLLTMFQTGQCVSTPHGTVVLHSSNRVLGHCIVKVLLLPSWAALPKYVRPNIHDNQQKLVKFKLPDIKNFKQFITTGKAISYKEVSMSLKLYRALSLRMLRPGTTIDDLLAYARTYSHTVAYTISSRSSQQPQFVTELMECCVCVYVESIKLNSAATRVMDIISSTEHPIDNVGKIKNTIWFALVKMLAECYHWLGLDTTIENLIELFASVGKETVGNIIKNVEKLVVVRISKVDTADPIIYYHDDTDQCEMSRTSMDDTRRKVQQVLQHVRESVQWGDQVRKNRNNLVKDNNDNVKPTPTSQLTDKLALRLGKDRDHEIEKLIPNLMECYDSNEMATAVTRVIKNVAKKLELREQPNIISCVGDERWISESTLLEKDKICMNDCFTLDDLRKEIIELRWMYPDECKTWENKLVIFSTIGSRGDIEPYISWGQIIRELGAECRFLVPIDYVGYVNDFGFEAMGLQVNSHDLITTCIEAERSKWNPIRLYKVWKEMFELIENLFKFNHTQLMKFTTGADLIVETPFTHIGMQLAQKLKTPCLFATAYPWEQQAGMTTRADRMTVMEIIAGVAAFAPFKKHIQLWRQNMLQLHNERGIMVHGVGNPMVYLHPKTTKWWETSKTSCCVGYANTMVDRVQDGDKDLCIWASQYKSIAVCFGSMTGKTRQDLTSKVIEKFDNQFRIVVVDGSYNLPANKPNVIAVKEANYNMLFSCVDVVITHGGSGTTHNALRKDCVVLIQPHFGDQLAWLKSVERLNCGGSLSKALSMPADKLMQEFATWQCNAKIVGAQIRSEKFYVNLVSNSVTLWQKAAEHTTNLLADVREPVQSLQLNTSNNVSLLRRAKLKWSDWESEAALTTKLILKSHFKPQFEKTGSSAQLPPSGSADTRRGGPRPQVPPKRVYEYTYGAPKDTSSTPLEQSGIEVIERQERRMHLGIKETEQQTTPLEPRLQLLSDVAATTEEVPIELIDSSSQTTDNNDDSNSSKEDDNVEMDLQPPEPDEIDYAEGFSVEQPPPEPTQVVEDVPMPETVGPPEIQFSVDATNELTSNSMLLLNMFELNPVTDWGPPMEVVTPGRTRLLLAPKSQFDCAKEVLTMAIQTQYDIDELRATNIVQKCYQWLRVASVPRVNDLKVIIRMLDLKLGLKLPDSNIRFEHKSPTGDTGPVIVVVSGTSLGHCILKEVSILGSKLIKQENCVQMGINRTTETQLNELFERCGGCGDWTRQNLPSLILNEETAEKAWVELNTNYTRQEFLHKLQGTNLVHTADRMEQPIFLARCQQSWSAIFCNEKIVPDRWYWINDGTCWDGAVSVELNKQSFLLTNSADRNWNRDIVTFRTDIRLGIGKSTQKRKPIKKKIIIPGESKVTALNRSTLHESTLNYYGVTLTGIQDESCDLVAVFEYDNRAHHKYDDREFLTKLGAEKCLGLGFELTSELWNKITARVTPLRHMIHKGEHKVALEFSNQAQRLTFTSIAHSSEIDYIAEGNSVYVSLANLDKLKEQCLEEWAIYMGMTNGQVPHIDDVLSKLSNWVPLSEFLSEHGGEVNPNHVFGNINIAQSKIRLIVNPGRTTMKLTNIVKVEMEYDPPKLVHRNMCITLEVMIDRRAGGLEEPEFWKFADDFKQNSVSRWWDAVTIEKPKTKFDASRFSQINTEALTGHGADEVNQIGMIIKGCDTGDATKLAYQAVQEWSNAIDTEPTTVEIASYDIMSLWEDTDFSDWNEKFCPRNEAVVKSTNPATHLRVTNKYTMVQYPIYSRPVLTKAANQEFNAITGRLHNITTYRRQNYNVDKELQKFVATYFDADKADILTSFAQNKLTYNDAKVLDWLRDRPDSNKVAVELEVILEEGMQLHAINRLNVHLKLESLLKAEPASSLKQVKARALLWQCKGYCAIFSHIFKEAKVRLKQMLKPNIVYADGLRADELSARVRLTTGVKYLLENDLAQQDKQTDHEIIKFEMALYKLLGVHDDVITLWHNSHFNWKYKSRTVRGEGDAMRLTGQATTALGNAITNMLVHRRLVNRLGHNLRLFLILGDDGLMFTNTSIDLSRLNNETKIKHNMMCKPHVSNTYGVFCCMIACITQQGNCSLGPDVVRLRRRFECPNGVSETTSENALARAMSYYMMLGATPEVMNEVKVQNLPIQPVKWYDVDSIRSAVAEKYNMSDEEVINEERQLLKMLRERQYFKHEVLHWFEGI

SEQ ID NO: 1271 - protein, 4939 aa, Cucumis melo alphaendornavirus
MGLNKNPFQTSFRKVFKENKSLIFDKNKIKLVPAIRGVKKFRDTCGSVAANIRFEDPLAGVVNFEAMHPLDIARIYYNVISGGCEIWKPPHKPISDYLNHTKHEGIDDEEDEEEMFLDSNNLDNNLIVRIVGPGRGNCTSEMLEVLNKLVAKFGEYEAYYNVYLETQHRHFGYLQKEDNGKYSFINAKFNPLKKCSVCKYMNHYEEMIRGLRMVHYSLKHYRPKSKVVTDEFLTTYNVGDVIEDVPWRCGYCFSDLNLQVFMREDRLQELIQIVTQHLFVLMGDIEQLLKMGYGDLYDDMDVASKEKLKSADQVIVNEYFYHLQRKIIPVGRDFDAAQSKTITEVLGGCFFKPQSKLNSVKPEFIAELSTLTELIEKSCASKQVASVGQILPGSSKENVHHWMHDSTWYSPDPAVFCCSEKVCGHKHNYIVYAGPGIYNRSLSNILALVDEQRTLQIITPIKTNQNTLADGTGAYQRTNEHLNLYLDGNPTPLKLKLDTYTIINNYQIIKLDDKLYYIMETQKLKLTEIMTIVGPFSDQVTYPQKLIKDDKGVKLRMYLPNIDSFMGDFRGLNYEEQEFELNVSLFRYLCLRNTSGKVSHDTLRSYAVGYSLRRFVVHSKVVSNPTIVYQDIDIHVILSRVCMMKLRNCYDISYGYSQFAKKLGPFRSWLGDVESAMTSSFLGLINKLVTDALGLDWNVVLNFIDDIRLQTLIDGISSTNFWEKLLAMAENINTEDVKVVDLDQGVDVFLGPNIGSCDHHKETCEHVGHTGNNRCLCCNMPITEFEFCDCCTPNKKEAGNFFDVEEAIKNESKAETELKKTNPARKDVLSQLVNEIEKLVSTKEASKNGVEKSSHWKQTFKNVAEGIKQGVSNQINRAIESSVPSVEGAKQTQTENAEEVKSTQTDGPPKTEEIPTSSEGWKRVTRRKYNDPQDMSDRMVVETLDKLQPLTVSSDSAEAIQILGYDFVRHCLNPMEYENILNDGTKTMYTMPHLPMGETVSQNRVFEVTTKIVIPNSDAMTCAYDAYKYGYATASLEEMIAINEGPPPLSTTVLTVYAKARKENLIIIGSTGTLQISRNSLTSNNYHCIWFDEPELGGVGHFMPAIIRRSSGDPFYFAHTLPGSLDERNQLMKLHYGPGTSMLTLPESFNGKENLLMELTFYNLHTYMSNNTSTSLLTIEKKDGRVFLTNNKDSKVHATNREKIHIEIPSHLCKFADKLQLALQFKLTAEDVPEMRHISDELPNNYEHEIEEEVNEILRSFIRVSNVQSGLDAKDIKFPYKGKLTSWYGRSKFLLLGGETHKMKRYDVLALKVDRKIELVYVLGTEGNSVILDKPVITSQEVTVYELKESIGSKIRLLVGLCQPHISIQSLKNKLSIAKYITGPAGYGKSTMIAQQAKAGDLCVAMTSTSVQALRLKCKKDVSVLSMERAIYDHCKTNGTLFIDEATMANWLHLGYLCGEDAQIMLYGADNQIGKKDMSATPGVRYNVTVKDFLKKENITKEYHSYRIGEPMVNLLQPIEPGMTSKADHKTTYNITTLDDTEFENIKTIVTRANPDVIITPYSHNRNKIKALLGSLDVKVVTTHSFQGMEVNTALVVLREDINRSRELNGNPEYLNSALTRAKFHTDIVVYGQYGTITDLHPLLRRVGGMPNLKKLIAPSSSKIPMKDKGIIIDPDTGLPLEVNIRNMHNLTQNMVDKLNDLSISNSGVTLNYEKLADGTRVVAKLGNSTVSTVTNKNGVIDVQANSFIKNKIMNNLDTNITIPVQKEKIDPNYNVIELINVSFRQTNKLRELAWMVDKGVGKTMEITLGGERIKVTKDSGCPLFSGATFECKDEKLKISNGWQSWTKRKLYFNKNIEYVRLSPIINWLELSHSELRHHKLKSIGWLDVMKGDTVHTLWQFQERLTQIHLWLLNFLTANANPKCYFNNVKNVSRYNKLARSLGLPPVSHHQSVVYHENFIVNTKFGWWRQNKYTLGNGDEIVAEVSSRDNEVVWRVFAMECLADMRHTYPKCQGISGTDFDIPGLHVPLHKHMAKNTAIHQLVCTNLAKIKEQIQPHTHDIVRMDKRGMALVKNYLNQKYPKMTLTTGSYELPNSPIEIALEQLMINMVGSLVKNSVNLVAYAGYVPLAVAILGKYYIKMAIPPLDEYGRFYYDMSKPQLDSMLDHFNSTRTKKVEWYIGTETRLERLLLGTRLSCMTPRKIDEALNQTKNVYGWLPMFRKSTDNYNYDHKNSLLSFKHGKLSNPLNPELFNCGLNGKPIFVNSKENYYLEMSTLTETFDHRLVQITKRQIPIERYIDRRIGSYSEMNNIIKIKVPWIDLDLLRIMSDRQILTIKELVINKKLLRNILLRLMTGEDSHDDALNYARTLESTQVITDKGIDDLSTTNLVVTLNTTWYAIYIHNDYLRKFQSLIYAVNSTQGRPLAVGLLEQLISGFSKLLGKVSVVAQDICEKYLTKLNSAINLTNKMADCIEEAKKTNWAPEMRNVYFNRFYFHDDDLGDINAWFKPGDDDDDNFDDDRNLERQMMEDENDYFDPQVESNIGRYRSILDKGKSPPTSNYEEPMNASTSKNQQCTKPSSDQQTDDDETDFEDALSSHEDSNELIERTPTNEQITNEDVTFIISSDNTLYLEQKFEDLMCRKKILRYLEQLCQYKQMTQEEVKKSLDILHAELNKNKEFNFDDYTVLVNAGLCQQDDFASPKYNVTPLNKIEIPTISKWGVKPIKYVRNNYHMIPKVIWTYWHSNVTSRVIKKCMDSIQHHNPNYEVIVITDKNIQVYLTIDNIPVPTSRNLEAKSDWIRLNLLLKYGGIWVDASSIGISSFDDCLQEAIDSPTGVLQVSLSSKEEPVKVYENWFVVAPPHNPLIKEWLRLFEEVLARNVVDLSTLDAYLEDKFVEYSAVKVKLGDSKRFYLKCYLTETLVSRETGMKPVAVIADDRRVDVHHDVKWEDWNKIALMYCLKHDGKMKVPIVKIIDIHRRNLEYYLNVGGAVEPESWLGQANNTANLVGVITDPELPSKIIELINSHYVRMCIDNKILAHKKSSVNKIHKQIIKILGDKVDVKITDSLSKIGNVLFELGLLLILNKYELQDLISKIGELEDVNQMNEIKIVDFVEQTLNIKSRYRYKLVTSNLVQINRSNKYPSKPKYAERNGIKIPLIIWSYWDDTTVNQFQVDMIDNWHYHNQEYRIVIINKNSLSRMLSKSTYELIMGQTPQYRSDWVRLFVLQQIGGVWVDSTGIFQDSVHPLVLETLTHESGMYQVSIQPRTTSPRYYDSWFIIATENNKLMKQWFDNLHEMTKHVHPSGSNALSWLEQNFGEYYNASKHLIVPNLRVYLRVCLIGVITCMQLETEPLSICEDEGEVSMFHKLPRNKWLNFWKLLTEEPAEQCKVTFPFIKWIGMQRSIIFRNFNPAIKPRPGSLLDQQMYKIEINYDVTKAGEMVIPNKHSEALVAKPIVISQYRQASTLIMCIGSGGDILQFIALYDILESIGMPPVIITHADHEKSLGNRRKHLLSITAESIMETVDTKLTKIDLSSDIRSMRQMKTMVKELEEIAFNYAHFSKFIIINSAVSKLKCFSEVAEFKIIEISTFPVDWVFGDNTSDKGHSAGIRLKRWIFNMMSDRKKIHNFESRYSYYNSCSKLLYPEGDKFIGPLTLWGYKSTADYITLSNRDILVTFGSCDKTISVDHKLSLMDNLITMGHSIIYHDPYRLCSIGTRMCDEVHKRQGKIIVIESFDLRKVIGSELIMLTHGGHGTVMEGLMAGFKLVIHPIIADQFQWAKRLRDLKLASIIYDISNREQCEVALIEVNRHIKYSEVLGSVQSIDTLKFLRTINPKALFYDPSVSLRALRGEGILDQQVTYKKGIYRIRNVAFSIKYNPVVVDKCVYESTIHQLTPEGELEFSMLRVLSSNKLKESAVTERDLIDGVLSMGLNIVIIYNNGSGVVHNVFNSKCLTYHIDRSCLPWHVSVPEVMSYQEGEVMNMLATPVRELPDDVITERDNWRSDFSVIELTNPRVLCLNQGKKKIDNLTARLRGFMLNELGSRAEIHCCRLELRRHGYVHVGDYAAPDQPLSVGCITSDQGWMLVTWQVKNNQMIIYGEQGIYTYSVLVNLHIQVGIPKAPKAILSKSIELMSLNKTTKQHTIINNLNPRSSQIVSSYMQKYRLIVSDYDNRDHHMYDEMTLLKRASEIIFHSNRKVTLDDFVESHGAAYNRLTLKQGMAIFEHYFEDKDIGALVVGAHNRYDRDKGGFETANRLDDETIAFIQHYFYNLNGKLIARDTWEINGVEILSNEEILPHTNSAIMFTLSEKENLRTVIKRHPHWEVARLTLAELKKNPIIHVQTTDNGCIILQNYLIILRPPKLGGDSELERQWWRITHRKTESLPTPGNWWGMKVKESNKTKSNFNDVMAINELHYHEPTTLSIALSDDVEYQPPMDIYIAPYESVYPGSILEPLTDLPDTIAMQLWEDNDLTNWLNLYAPLNNCIIKSRELPGKIIKSEKLTMVKYPIRSRAVLTKVCFEEGRSIIGRMKSVAMIRTKTPNPYRLTLDIADTYFRPDWQQMINNYRQELLIIRPKDVKKWIEENKDCEKIERELIDLLCGELISKPINDVNVHLKLESLLKENFTIMTMQQQARIIVWQRKAVCAIYSNLFVEVKRRLKEVLHRKIVYADGLRPDEISARVRLVKNVAGFFENDLTKQDRQTDKPIIEVELMIYDLLGVHPNVIASWKEMHEVWRFKSNLYWGQGEGMRLTGQATTALGNCLTNLQVHQNFTKTNFCILQLGLFLGDDMCMVFSEKPDTSNLRKDIATSFNMQSKDSWVINGATFCSMVMTRTNFGAELAPDVVRLKFRYEVPNGVHEATPTNVLMRKASYLMMLGKGPNVDDTVRMLNLPIKPIAWYNFDHMVTAVAHKYNMNEEQVRGYYDQLLATIRSDNIYSHVFRHFSNK

SEQ ID NO: 1272 - protein, 4603 aa, Dicrocoelium alphaendornavirus
MVLPLAISHRAPLLGRSLYTKKRIHAKDVCMYQVGLQSTDIPKLTLKHCRYKTDNYMELLFHNEPVGAAWNCKCIGMSNISAIWFGKVPLEVDGPFKPEYDKSMAITSHKGYPQFPEVPPLSDRKYSVRKYTQQFRQYIRHEASKYDPHRRDICACMSYRANLIDDVVYTPKTVDGVAYFDKGIYIKCRKCDSITYMQGSNALPEDLNVSKEMICTLINNIMFAPIPPEDDYTYDAMTPIMRNLPPEFELCASLLCGLSGQDGGNCFNCGSDITELLTCIIDPVLPKVIDEYAVQGNELKELMACLYQDKPPPAYLPNACQTKINLENRSIAVFLNRQNQFYINNRFVMSFDRLNNIDPMVSELNYLGNQPISAERYYAHEVSEILICNSWLLVCGSSLVLEPTSINVYHSFKDVCHCLFTNPWFDELCGDTLVNDEGEGKMVLRPLHTHVEWSELIGDNIVVLLPNPKNCGMIEDHVNDNYVTPVTGSDRLVMWHGHYTRLIANHAIVEMNDEYYRIETLKSTAYHQLVRVLKTKDLSHCRLIVGKSTINVKLPTFSTDRMLKCLGVFGDNWVYQELNVQLVHRLLIHCISGQKSVESMLSYIAGLSNTSYVVGGKFVELSNIKIQDGIPELIFVMLILNDKRKLVSLMRLHCLSNFDANNSLKEMIQFIVSRCVLLFKKLKPTIYEHVCDFLEEQLQLLFRRDLATISSKVDVDLKTIMPYVLIDGIGRDDLVQLAQNPSTLASCYHHSLNCQHQNTTTRCRCCQQQIANDSGICSCCISRHTQKHKCHHPCVKDHRCIIKQKTNSCTHWTTCVCCGVRGCEELCECCLEAPKSVLPVEAVVINNGVDNLRPINVAHRIVKKATADFTKKAKELTKKIFTGKKVGKIISESGEFKCPSLIALRSKPTCDLFVQLDGELFIPNLATTSHIMFPLPRKLLKTDISDPILVQKNCLLHCIIKQCPYELNDLIELVGDKSTHDENDLNIICSNLHLNCMYAVNNTMHIVRKGPMTDRYMTICHGSAIEDNQNVNHWSLFNLDKSLITNDKLQGVWDDKDLCEFAPQISHFNTLICSEDELKTYRHKIASLIHKFNSENVLCPGDDFQVVGNDTNLFITNSKIHRPIDGYYNFKWPVHLLGDTVMKSFNYRHLDPSIVGTVVTFNSTTTVEEELFGNIKLYCRRIHQIMCEGYNDNDIRYWKPISKRNNPIIFNPGELPPMIKAGDYLLLKHIDKSITKNTVYRHNHLLMVNNVCGKDVIEIGVLKESFGSIMRALLTYSNYKDRLRRYETCTLHMKVVGVAGSGKTRLIKSIIQQRKETCAVVCKLSSGYQQFIGTTAAFVGSVERFMSMEHVPVSVKCLIIDEASLVSELELCMMCHNCDMQIIACGDPLQVSNVDFFDTPGVRERKSILTLNFKDNRQLTQSHRFGDPLVSKYLNQLYPDITGNPNRKTECQILKCDNLQSVVKLVSEHKIDTVYCYYNRHFNILKTLFGESNVRLLKVHADQGTEGKRVGIVHFEDSSSTHSIINKREYLVTAMTRASELIVFISNQKEVSTVQDLIDLSLISGSGVKEVNDNLINEVIPEQEYNDLVQSLKRRKTYPPWIDWYSLKLKYKMNSLEREIIRRGLELDNIEDIYVYNDKFGGKTNLTPSFLGFRPAATMIKFEVTMSGVTVTRNNQPLDISGKSNIITSHVLHLYDKAMDDEIYRDKFIEWLFKTSRVRCSVVNNDGTVFQSEELEVAKDVATQTLDQDNSATMVIETMINQSECHDGDLGEXFEGLILHDKSNGDHASSKSKRFESFKSSWKKLSKRMSFSRKSKRLISDEGDVYDAIHGKVLGKPFVDXVEINDMAXSEDPXXPQMPLKPFTDAQNWDPKVLPLEKDEQSDDSMEWDDEGLLLKFNNTVVQLHNYVDDSVVERSEVMGNIIGAAVSSRSDSTTFNWDSILESMSGVNLQDLNCKKGVVTIENNLGTDNVVMVTYPLSLVEWERLTLLCECALHCECSHLKIPFEFNKSKFTLERQSGCCFFSGAVIRWDNNDIVTISSAHTSKFSLMSYMSGHLRCLHGKQHRINEFIDILNNSSYWSTVQGTYFLKKLLGRLIYGGDTLSNAIMSCSKPDFSTTYNNLCTPLAKQFEENTGMQMKNVNHTKLKFFVMVEDDGFLVKPHNKFITRANDLFQLLGDISGVDEPQMSLKNRLKADEILKRKYTAEEKGSIKVIHPHALIPRHKAFIDKFIFDEQKIITCTSGIRDDTIASLIHGIFLNELYKVFNVDKLCIHGVDAITVVNQGHENHRLLLEEIHNDEVHIINEVLAHKLEAVMKQIDDLDNPPSELKERLQYLQTEAIHVTDEKTFSTNHFYGLGVPVELKNENVFFVTAELYPPYVVEINNNKMLIGDNGRELRETNVDHTVISTIGPFKLCKATRKQHYKWIENYHILSGELVLADTLGKYGTVVVSEKTFHKAMAKASYDKCDLNDLVAYLRTQASTNLYTSSGISICDEINPHDIYMIAIVCLNITKRNRKIAGMAERLMGNDGISDTGILGWLKSTTISSIFQLLAQGGHNILKRILDGVDEMVRKSEITSTFLDCITDVEFTIVPQHGTLIGLNAPEEVTHDSFHFGDDGPDDDNSNTDSKDEQEDNVEADVPKCSTPQSDKLNSDSEGTRDGNTDPKIINKCSLWTDHGTDTTTYVNFEKNLEVCEEQLSAMPTDTNLIVTQPVEEYADIEDQPIETDPMSNVVNGTPQSPSFKYVNEITTLTRMHFNSPEPKMFSCEVPTIGADFNLEQFTGEITQSGWYKLPMSDFPEFLNYERDSVVRNDATINLTEKLFEKVSRTDHSVIPMNSLPIITEVNVNEYDLQMAQEFKKIGEVPLRDISKLTDQMDTLAVYPKECTSDECPDIPPDMIYSRIHECSDSELFSTLPRESKMGMEGRGCIIIRELLRRRIPRKHWNYLTDVRKYIPCTEQANVDQTIISDQLCENTDEGRIENKVKQGLMKTITXVVKDSLTKIVDDIKNTDNTKDIYNSQFKMKYEEHFPPIMQKVTVDVPKKKRNVPKKLRKQWTNNTEPKASGSTTSIMNVSDILKQTIASRDVIIELPPGERRKPRAAFVFTGSVGDHRPLYVIYRILRDYYNVTIFKPGDLNWEFFNDEIINYIDTYETITRTALREPGKVHEVVLPIIKAMKEFPHTAYDVTVGLFFSMELQCLKCTRLRLYIIPQFSLGKKIEHFTWSKTIMGEITGPSKVLRAYTLPTEMASLIDGPNLGWPLYEEDFKMDPITGRFIEHCILYNKKYILYTYSSVYTERFLTRLQEVLYERPDDNFVIVVGGNDWVYGRMVEHNNQLIVLKENLVTEHIYVTQRLNFMLIIKLITEVYHHGGAGTMFTCMFGNVKQHIEGFGVDQPHNEKAYSKVLHSLRCDVSYNYNEFNRRVRETLGLPPPKPSEIITVNLPELIDSNMFSVDVKLNDEIKIVKTYITNIEIIGNTYVKDCVLLCLLDILDKHSMFEHHNRTKRIYEVFKANIGLDSFENLICFIICTQLRICVVYHGYCYEIVHKTSTSNVIGYISIDVDLTHCSECSISDTKLSTDLLHYNWIDCSLDGKVKETLSYFRTLKELLTKGNTSSRSYSTFNPIFHSLFNTYRTHFGEMLMKKCHSLQVIENAHYVKGGVLCNFDLPINKLVAMITDKGICFGVTLLNNATNRGVIYHGIYDAVQVNLLLYLDNLPLDIPYKIIPLIQHASTACLNNSTLRYCRANGVPVNVIAKESVHTLYIHNTYNRVLPDRNEKEIIINSGNLIVVPNDITYYEKNYLKQNHILKGLVLLGEFKIGLELVQDVFAQNCTIRFMKSLAQCYLLHDTNLLVVDPKIRELRQQVEELLIPVTTDNRDEYKYSGVDGKLHFEDGTRYTLRTWLEKLEMDVFWVRHMTESWLKSHNGDPITTELEKDDNHQISLTGRQLVTLRTNKIMPIGDVLVTYKNFMVLRIVVSGSGXLMALKEVTHGKYHPVPXPRDYIESAGFSMHCKNKHEDELNYNXNLAVDVVERNELNFRPPKTLVDLIFSMNTLSEIVYEHSEQTIETTCIEVYKNKGLELDLGTRCGTSWMPDAKTIDYWDNNENPLNQCILPRNHRMAIKCSLFANTYATKRFIAMVANPCIARPSLVDMVFEEFNSFANRQASYRILQTTKLNIDTEVELFCLNYFDYNRCKHYIPMFKGNAISFDVEASYKWCIEHKYSKDVLESIKDLWEMGWERNPINKYAVHGKVEQVTKMDKISRWYDEVVSRSIIHMSYAKACIFGPIFQEAKKRLQLLLKNHVIYVDGMTVEQMNAKLETIPSQPKVIEDDMSAQDCQTTRSLISCEFKIYELLGLDKGILKFYRQCHYNWSWKGRMISGTGDAMRLTGQTTTAIGNAITNLFVHNHLVSKNYNNIGCIMILGDDLIMTAAGMIDVSQHGTITKQIYNMVTKVSQKDRVGGFLSMILHTLDKHPKIVPRFRRLKNRYSLTNYSYSEKVMQDKIEQRTLSYCHVMSGFKEAHCIAKQINEQVNLPVWYDTSTSILANSIYEGCSTSLIEQDIADLLDMLARREPIIYEMKMMICDNLAKKPRERAINXNFLANLVEER

SEQ ID NO: 1273 - protein, 3952 aa, Erysiphe cichoracearum alphaendornavirus
MTPRQSQKSRQRNTTIHSGRRRNGGARNEIKLKTLMLFQHGVQGSHDIPPITMKQTLKGDNQYIDTYLADCNDVVNTKRLGISGVINIYHSKATYPVCEPYSSMTFNGNTSHVRDGKYYIDDYHGEVQDLCSFEKYRADLLRDIRSSKKTHGTKKKMELINWLTDKSTAFPYGNMAQKRDGFLELLDGYYIKCAHCDCLTYLPLSTLINPNVTKAQLTQFLRDFSTQKAEFFPDAEIYGELAMMVPMCFSSSSGSCFNCDEDLFSETINMMHAIYTESIAYHNTIRGTHIEEMTKLNMLQGAPPDDMPVATAKYNELHNRHAAKALAKMNINHINTIYSLNDSTRLEMMHARAHTRITNTARMNTTPMSILESEEILLVSDLASATAGNLVHHPTTITTNASLRDIVDTVCNGPYFADTGVTIDIPTAAADYLEIIPAQHDMDKMLNYAASGAYVMLIRPDVHNVIVKQDSKYYYTLATGTDVPVKWDIRTHALLSNCAKLHDGQNHYNIHTISHGAYLQIIKLELSDSSMHARTLGNQPTFTASIPVFDPLNPLASLGVFGTKWEYRQINVELLRRLVTFALTADKSPGAIEAYYAGILSTHYTIGGKVVDLSNTPVSEGVPEIIYAMMILSNRKLVTMWASILHLNNYSSVNGLKTITNFFLSRLIRVAVQLADKVLPWFEGVLSKPSEFAKRLVNTEERIDVESVFAKLLPLLIITSVNDTQNPAKPAISVSESAVCHHHTSECNHQVGDVRCICCGVLNMNSICECCAKHTKCRHSCNHACTNKLHICKKCANGERCVMRARCPCCNVYGCIPCPICPQLEKFEVSDVQPTTAMSLVTKVAHRTMKVPESHRRPVQTTPAISRPNLGNDALINLAKSQAVFKPSDTKHMLHTDYMNINKPNHLFVIDHSDLYIPMLSFTGQYYVPINLPTPVVSNPIPGTHYCAYACIADQTNNTIESLKNMHGDRHSMDAQELRHLIKLLGLNCLLLLNSRTAEILRYGPQASKYLLIAHGSITAEVPHNHWFVPHIPEFVDMPTGYYGPHNLGQPFEDMSQLNMWKASTLEMGRINKKISVMRRQLQHNKPGATLELPRVTLIGNSYYLTNGKTHEPRIGNIHFMLPPMFDEELVEAVNGSSSKLVKSLYANQTNEWEQVETDAINLLKLKCCDINNFLTSINDVEDQNKCTRHVIDSDEPFVPTHVLGKLKPLDVVRIVQGSQSTTIIVAGEAAQPVVCNPYGAGAMLYQFKVSLSSLYRSLIMVTKAISNLDNVKTMKFGRVVDGVAGSGKSTLIKSFPNREKTTLVCKTRSAMESHIDSGFHSRMTMEAAGLSEIITSTLVIDEASMITNVELLSCLDSPHMQVHMLGDSYQIGVKDMSSVLGSRDENSLLAQLKNEALTHTYRFGQPLVDTMLKQFVPNITCQPDVTTKLTHLTADNYDKVLQYCSDHNVNAVYVFMHADYLQLMHLVGDKLSINKVHASQGKEFDTVLVLHWGNFSQETSIVRSSKFIFTAATRARKHLIWVTPPAVKISLSSILDIAYIGSGYADVSVFDVDRCALTRNLTKLEMELLGEMLPNHPTAKESNSKFVIKPHCINVTALGPPILNKRPTVSFVVDKSGTYGTNTVARMGIEKIKSGIRKHFPSSFAKLQAEIQSIENPVDITTPTETSEMFSKMTLSPNDAPSSDTTDIEHLKPKTSFTQLREPTILSNGSETSSSEDSLNQLAAEERTSHTNPSLLTAQLNYMVSNLNHKAKEQAGQVLGNVLVDTDDHHTTAPYINDRFSFGTPTPIVVKQIHLNSELWSRMIVLADVVLAYQCTNAAITWKVDNSIFKLSIHNGCSLYCGFKFEFETETVLISSAHADDSRDGALTTLNACNRHIVGTTTAIVKVLSFFSDNSIFGPVSRNVCMKTYRERLSNIFTAVISNCTFDSVGERFGNRNEEIAQSCIDYSDSWCVPTHQSMTHFIVNSDTGVTLQPANITVTGVHALIRMFSGIRGEDAVFTLNRANKATLDRTLIRHMNAEEKFDRPVSIPTQLMRSELWAPFLQQVGSNVITPVALGVTSISTIHGAMLLGGAMLKQMFGTDTMHYVGLNAQLFTINYNIGDTIEKVPGDGMIYIKNMLKAKVKSYTQQLEVESDPSKKEQLLSDINFLGDINNVLRSTIRGVVICHPPYYDAYAGDNCYTCYPHTTYPTCLLVKGNLIESSEDGTKFSVDISHTVIMGVVGSYYLHKKVTNLPSLTVQASELANPNYRVFASNVAGMETVKIPDAIFRRMVARAFAERDTTLPDMVAYSRSLLNTMTYTSKGYSFRYNDNPLELLQYSVVVLNFANRQRKLTSFVGAVLGASADDNSNNIASPIITLLTEALKTIGLQVAQGVFEQPLAILHEMLTRGTINTPIVSDVFAVLRDANYQEIFPSVRLIQRHHTDTESTMVVSPQHPGMVTQEEVDEVIGEMPTSATLPSGLSQLVQPVVSKFKKDVAQVTTQSQVEIIRNTSNKLINTWYDMRDAWNKYVKNDDKFQPWEFDAPIGDVLLLYAGSRGDAQPLDTIAEIAVKCGLSVKALIPADLHSRIPGVTYVEYCSSYDHLTNSGVNGTLPDVGEFAKHAMDVYQHWLIEHMKHRIVIGLFFSSEANLVHGTEKNIRIIPQLDDEWDGNKKCAHGMGSNSIRALFQLPQPKLTSYWAVPFDVLDRADNLGFLIPQYSLSIDNNTDMALRFSKKHNGKVRVITLGSMLPSDFAVRIDNMLRASELPPIFVTGKISTAQGTFSYKDISYEFSAQGMYEDICIVKSVNYLALTGHVQECHNHCGAGTYLTFKMMGVRQVPWPVAFDQHYNAYYCNETDVKSNGAKPSLSVEEQINKSARNVQVMLGVKGAVQNYELRLLHQVGEMVTIPTRIDSSIIMQEVITSGLKPIKNNYIDNCVLNVVLDCLERHPIISRQAENLYRTQTFITVSDVMEFLIQLPVSYLICHGGTAIMCKRQSDAHVRIYVTEDMSHAEEFTYTGVVNAAPVVDDVYQDLIVNGNFEDDIKIATRLLEGVPQPSVQQIINHLAQTSMRKLHPVEIFKGTTAVGHFQTTVRLSAGYSYACFTSDGVVMALCVPSVSGNPILLHMHDRQYQCAVVMRMNKLINIQVGVSRSLIRSTTLVAINHSTATKLKCRGIYVSSVGQTNADTLYIYDTWARKHHLEPEQDVIRSAKRIMGVPEEDKAMLFDLTTKRSLLLHNDYPVCIAKGKLYFRLEHGCEQSAAIISRIRAVSKVSDNLAILPYSQEKVPMVMIVFKYDGTKVTYSNTSDVSPPSTLQELVDLIKLDTQVAINQLKNMATQHGYMTLEACKIELVVKPISLPDLSMAVRRKLLIADTDILINLNAWRFQIVKQGAGFSKFDELIIPSLDDNKFNSGRYVVQNETESTTITNNMPALLPLDFSQADVNFVARQQLSYHAKENQIISVGSVGSVGMEVDAITLDEIPQSQVMDFWHNEELLDSNIILPTNTSFTVSSRIHPIRIKSNAYLLMEMYPMYARPSRSKAFAEELNSITNRHGAYTVYRKVNLDVKMEVQMLLDNYMRADCNQIIAQYQGSQINFEPAKAQAWIDKHNMPAKVRSDVIEMLNSGWERTPINAMSVHGKTEQTTKMKTTRWFDEVVTRSIVAAPYAVSALFADIFLEAKQRLKALLSDKVFYSDGSTPLELAAVIRSSEDFTFCVEDDLTQQDRQVDHQLIAVEMELYKLLGVSGNVLAFYRMCHEKWSWKGHGISGVWDAMRLSGQVTTALGNAITNMIVHNRFMLRNKSKICKMLFLGDDIIFLMKQEVTVTKHGTETKELYNMQSKIVSRRYVGGFISMVVYNIAGNVGICPHFKRMRHRFSVCNYTYPVDETADKVKSRVLSYLYMIGDCAWARALVEKMGYSVQLPQWYHMDTAIVANSLYDEEEEWQTRSHISALRYMLENQVVKRHKFLTWSSV

SEQ ID NO: 1274 - protein, 4027 aa, Grapevine endophyte alphaendornavirus
MTPRRSRKYCKRTKITHSGHYPKGSARNEIKLRSLHIYQYGIEGDHDIPKLTIHHTLKGEHQYIDTYLADQNDVINTRRLGISGVIDIFHQRKEYPVDHPYDELTFNGNTSHVRDGLYYIDDYHGEIKPTYNFNTYRAALMDDIYKSNHVHGTKRMHTLVNWLTDKSVAFPYGNMAQKRYGYLEALDGYYIKCAHCDCLTYLPLSTLLPPTITRAQLTQFLREFRDQRECYMPDPEIFGDMAMMVPMCFSTSNGNCFNCDEDLFTETVKMAYAIYSESFAYHNVIRGTQIEEMTKMNMLQGAPPDDMPAALSKYNELHNRHAAKALAKMNINHLNTIYTINDMTRTEMMSTRSHLHITSTARINTTPMTSLESEEILLIGDLASATVGNLVHHPSTLVVNASLLHICDTICNGPYFADTGITVNVPMSVENYLEVIPAQHSFDKLINWAIDGAYIMLLRPDVSDIIVKQDASYYYTIATGTDVLVKWDVHAHALLANSAKYFDGANYFNIQTITHGSHLQIVKLVPADNTWHARTLGNKPTFEALIPVFDPINPLATLGVFGTKWEYKTINIELLRRIVTFALTADKSSSAIEAYFAGILSTHYTIGGKVVDLTNTPITEGLPELIYAMMILTNRKLVTMWSSILHLNNFSSSNGLETLTKFFLSRLVKVSVQIADKVLPWFSGVLSKPTEFAKRLLSSKHPIDVDSVFAKLLPLLIITKQSDNTEPIAPPLHVLDSAICHHHSSSCNHSIGDVRCVCCGIMNANAVCACCVQHVKCRHSCQHKCTGNLHACKSCMNNKPCNTKARCACCNVYGCQPCPACPIMEPMQLHDVQPSSKMSIVTRLANNAMKVPVAHQQPKTITPAVQRPNLGHDALMNVPKGGAVFKPNETAHRMMTDYLQITRPEHIFIIDNSDLYIPMLSFTGQYYVPIQLPNPVVSNPIHGEHYCAYACIAEQSNYTVQMLKNMHGDRHSMDVVELRHLLKILSLNCLLILNDTHAEILRNGPQANNYILIGHGSITDEVPHAHWFVPHIPKFTDMPTGYYGPHNFGQPFEDFTNFNMWNATTTEMARIQQRLKVLRSQVRHSDKLGDLALPKVRLIKNVFYLTNGDEHTPRLGKIHLPLPEFVDEELVDALNGVDSKLVKSLYANQTNEWSQVRQDAINMFKLRCCDINQLLVSDEALMSPLQSYSTTVDSDEPFVPVHLLNRVKPLDIVILKKGTQTHTCVVAGDARQPCVRNPYGSGVTLYICKTSLSSLYRNLIMCVKAINNLDNIRSVEFGDVVDGVAGSGKTTLLRNLTNRDKATLVCKTRSAIESHYDSSFHTLMTMEAAGMSHIVTNILVIDEASMITNVELLCCLDNPNMLVHMMGDSMQIGVKDMSNVLGNRKENSLLAQLANTKLYHTYRFGQPLVDKMLKQFVPNITCEPNVHTELTQVTASSYDEIVQLTNNYKVDAVYVFMDADYVQLLEILGDKIAVNKVHASQGKEFDNVLVVHWGNFQVETSIVKSSKFLFTAATRARKHLIWVTPKTVNINVSKIMDIAYIGSGYESPHLFDVNECRLLRPMTELEMGLIETILSNHPSAIEANSKFTIRKSSITVEAQVKKWLTNINISFTVDRLGTHGNNLASRTAIDSIKDGIRANFPAGFAQLESRISEIMSYSETSSGITSDEENAIGTLYDADAEPVDTNTHTVSYHSYNISIDETEQFATPPRPDTVRASDDRPVPMPLSGASPQIFEAESERLRKYLDDVEQQRLSAAPTISAAALKNTAQATTLLQEALGDASIAEALPTHMQPILTDDHNPTDSAVATVLTKQLAHMVRSLPRDTRGTQPTPVGAVLSTDLAEPIQQCLDTRAFGILYKLQVKHMHLTAQLWSRMIILADIVLSYQCTSTALTWKHQGHLFKLSIFGGCSLYCGFKFEYDDDTVLISSAHADDTRDHLLNTLNTCNRHITGTTEGIVRVISFLSDDTLFGSVPRNTCFKTYVERLTNICGGVLTDCSFDSVGTRFQTENTSRAISCDSYSDSFIIPTHQRVEHYIVTTSDGIRLEPCNVIVHTAKQLVQLFSGIRGTDADFTLSRANKATLEKTMIRHLNAEEKFDRPVNIPTQLVRSELWQTFMQQVGSNVITPIAIGTTAVSSIHGAMLMSALMLRQMFADEPIHYIGLNAQLFCLNYVVGDTISEIPGDGAVYIRQMMSAKAAAIAALIEGESDADELKRLQDELAIVSDYRAIVASPVRKLTICHPKYFNRYHSNRVFTCYPYTTDPTCIVQDGKLLEASEDGGSFEVSLDNTVIIGVVGSYYMHKHVEKLPEITLQSSGIANPNYRVFASNVPGMETVSIPDTIFRRLVARAFADADTKLPDMIAYSRSLLNTMTYTSKGYSFKYNDNPLELLQFSIVALNFANRQRKVTGFVNSVLGLGVDTDKSSSYSPIINLLVESLKTIGLNLMQNQFNQPLQILHEMLNRGTMETPVISDIFAVLRDANYQEIYPSIRLKYRHSERSNQTVNSDTAANDNDVDSHPNTDAGDTTDVQTTPAVAPTPKPDKGKGPALPDNSEYASSSQTQQIAKFFSDKVITTWHDMHEAWNKYVKSNNQYQPWEFNTHVGDVLLLYAGSRGDAQPLDAIAEVAVAGGLSVRSLIPADLHSRIPGVHYIEYCDSYDALTTCGVNGTIPDASTFMTHAMDVYRHWLKEHMRHRIVIGMFFSSEANLVHGTEKNIRIIPQLDDEWDGAAKCNHGMSSNSIRKFFKLPKPVITPYWAVPYDILNRADNLGFLVPKYCLNIDNNTDMAIRFSIKHNGQVRVVTLGSMIPDDYLVRINNMLLASPLPVILVTSKLHNKSDKFDYDGQTFALNMPGMYKSICIVPSVNYLALNNRIVEAHHHCGAGTYLTFRMLGVKQVPYAVAFDQHYNAWHYNKDAVDSADKPPTSMSVEEQLNRSIRDVQQMLDIHGAVTNIKLVDPTALGEIPFVERPIDTNIVVKPVILRGVKTIKNTYIDNCVFNVLLDCMQDDPACARLVDAACATHTFMVPEDVIEFLLTMPCNFAITFRNTSLICDKKLNVNVRISITDDLSHAEEFTFDSYEEVAHATSDAFNDLIISGDYTRDVQTVVESISTLEPINFDKVRHSLVLTSMRKLRPLELFNGASGLAHITSSKRLSAGYVYACLTSAGLVQALCVPSLNGNSMLVHMQPVMYNCAVIIRLNKLIDIPVGAKRSLIKTTNLVAINHATSLQLQTRGIFVSSVAQPQADTLYIYDTWARKHHFEAEQETIRTAKRIMAVPESKDKPLTDITPQKPTLLSKAYPVCIAKGKFYFRCESANRATNDILNSLKFCSKLTDGLYLLPYKSKWTTLFTILFKYDGTKIEYCNTVSVDPPTNLQELYDFTKVDTMAVKLRLENLSKQHGYTSMAECRIEQVTTMHTIETYSLAVRQKLHIEVDHLITGANGWTFRIAKQGAGFVQFDEIHIPELEDSKFNNSKFATPLQPTPSTTLTQDMTALIPLDGKDLSNNFVYKQTLNYHAKENQLISVGNVTSLGLEVDAIKYDEIPQSQVIDFWNNSELLDSNIILPTNAQFTVRSRIQPIRIKSNAYLLMEAYPKFARPSRSKAFAEELNSITNRHGAYTVFRKTDLDTKQEVQFLIDNYFTKDYKSILAEFQNQPITFSPAKAQAWIDKHNMPKKVRADVMEMLATGWEKTPINAMSVHGKTEQTTKMKTTRWFDDVVTRSIVAAPYAVSALFADIFLETKQRLKAVLGPKIFYSDGSTPLDLAAVIRSSDDFTYCVEDDLTQQDRQVDHQLIAVEMELYRLLGVDGNVLAFYRMCHEKWSWKGHGISGVWDAMRLSGQVTTALGNAITNMIVHNRFMLRNQNRISKMLFLGDDIIFLMKQEVNISKHGTETKELYNMQSKIISRKYVGGFISMIVYNINGDVGICPHFKRMRHRFSVCNYTYPVDDTDSKVQSRVLSYLFMLGKTKWTTDLVAKMGYSVSLPEWYHTNTAITANALYDETEEWVVRSHISALRHMLEKQVVKRHKFLTWSSV

SEQ ID NO: 1275 - protein, 4867 aa, Helianthus annuus alphaendornavirus
MDILKKEPKPKGEPSSIQHAGDGPPSVLNVGEILANINKLVSARDRRRQTLRTKTRRLTENNEFNVKVDPHFQPKFVKCVAGSNKQSMKKSPHKWQHNVMVFNTINLGKRDPHEIANKLLAYGAPAKVKDCQCASCVSVDNQRSKVAINTQATLGMWSITKDPCALEGIDIIKYRPKAIHQLLSTEQEFRKTLWDFKLEKTLDEVVTGKDQFKAHMRRQFTKYLKKFSGYQGLITEALTQTTRCVPWAQVYDIRTGEPLANQFSHRKPTPEERTQMITCPHCKCTNSLIVPRDLKPKLVDLTDHRCGACGRPFQEQMHDPWAEIFDIFDESINPNVGAQTEMMKLMGRLDMSEIDEAYTLMDIAEKHDTRLVKSALSRLQLDLVDVPLNMEKSKLGVLDQLFGGFEFVPKPGLVTDTPLEDTFRNAVMTMVKKTTMSEGFYWPDAYQKPNSSRLNVVNPYQCCGSLECDHWIKKNTFITLESLSVGLNGILKMIERSGKEAWVCLPTEGYNPKADSGQFEGGETHYHLSGHVMKLTRPGHDYPMIVDKTDYENLTEGDIFHGSTGTYMATTILTGCGHKVRIIKKVDLNIGEIIPKLKPTKARPQTFKIPTVLPGSLGSITGILTSSVKEVTVEPTLLKSLMIKNLDASMTFAELLEFGMAFSFTRYHRGEKVISYQDLTSTQVIDHCVIALILTRRAMAARTMIVSATQKNSVMEVIQSAGLSVGMTTAVTLLEGITNTTIKSSLKTLMSRVDAISVNSLRVIGEHPVWDDIQRWTTKVTLSSYRIIDYRPLRATIRKEVTCPHVLSVIEQGDQQCLCCGRLARSDMCKDCSPCANKEHACSHTCVHDHKGEKKCLCCQLPSENKVCTCCKVHYSVADMVGQPTKKPTKKPEQPKRDSSSKQTKPEQKPGPKTREEEQGQYNDEDEVVIEAAEREDALIQQTSLDFVTALLSPEAWPTEATKNPPCGDIPMGSRILYVPMGLTIGESKSVKVTSHKVIPNKEGTCGLDALRLGMGEQVTISVMETVTKKTRGWDVDDLLKVGKALGKNVLVLTGTEVHVMKSNSEDDYHTIIHSTALNKEGQHWYPGTVQQVGVIRKEVVYNPTITMQTMHKIAQQVTRKKVNHYDVALMERKELIDLHVAAATVAETIKIHTVVDKNFRLETNQDEQYLVNNKEREHNIREGKICVIVPTYLLSVIRHLTRLSPDSISNDDVNTIFDKDDQIPETLNAWIKSEVADCVKTILYALCYDVIPKSTNPLRITYEKFDMIQDGTRTVLDVSRTKLKSLDVIYLHQDGKIVPTMINPKMGKIAITTDKSYRNKGMTIGIPQISIGSAIRNLASLLTMNTQSTYAMSKLEDSVMVLAPPGAGKTTEIMKLLTESSLVVASTGGALNSLRQKKPPCQVLSVEAGKNYDLQVDHLVIDECTTVGFLDYKAIVDKVKPKKVFAFGDTSQIGLKDMRISAGTRAIQGLNTYHKSIKKLNHTYRIGQPLSNVLSEVYNDLESKAEHKTDFEVIWSSHFDPETVYEKALKHNYDVILVHYRSHKAALLQQLNIIARGNTPLAQWARRVRVETIHSYQGQEADKVMVIQRSNQAGGSIEFDPQYNISAASRAKKHLTWYAVGVHSPNVDLGTILRPSKNIVGYGLFDMFSRFHTDTIQESVKQPRLKKRKGIGRQFLKTINNYLDRKYKATATLVETHDREVLKIKVSVITMAEVTISADGTIKEGLNRVGDLSQLIDLIHSNLEDKPTMTCSCNTISKIPSHKTMNQLEFNTCLRLCNLNWVACEMAMVGETLRLAVGDKLYDFVNPGECHVCSKTTIVHQETEIVRINRSHHFHTDVSIEYLIPEENLLVEHFDLMNNLGLDEQLITHERRPVDSPLLTRLANTELTINTYVLQMRKSIETTLKRTGNFIVDSLFGLKHETIDSETWCQSRGLTCLATIGNEMSRLVKVEVDNRIALMLPIEDSPIHYLEEEGKRDDNCKTMEEFIMEYINTLNTDGLLTKMISILGQMKVGGRDDLVNFEGLMVPYERHMARKDRVWHTVVNKLGKMYVESKRGEDSILYLSQTQIREQGRLIKQQFPHLAINEHRYMMDSDDYGSTLEQLINHVLLNDSVGKVDYVTYRPHLVILNSRINCRLVEPNHNRLLTARSKINETFMEGMCRNVEEAILTMASENEKDELVAITKQKLELAQKCIRQKQGNWHPSKTFSKDTDLICLGECGLSYEPSQLAQLVMENSGRRIIIWGPNPALAKLDQLEVEGQEYLNVVDKRTGGHYIIHSGIWDSMKYGLPIAQEEKTSVLLASYMTIGGLIVYDVKIKRPQDIELSWFAPLDSSKTTGLITIEVPHIHRDVVKLAKEGVPIISTRRIVADARLLSNLAKRMLRPTTFDELLNYARVLAHGKHYSLKGFTSVYEETPQELLDITMGVYLIYSRTIESMEGMTEGIISRRDQDLDTFKAVLTERVADFKTGLLGLVSKYTGLDLDLSDWLRILSSGSRDHLSVIRQMITTLKHTRARLLDDTRNIFPRPTVGSAPESKIEKKDYSNNPFRFLELAIDNVKALAKLTFDNTHGSFKTATKPAIDKVVPQRRIADSHPTSDYLNMIEKSAMLTYQKFQQLPEFDYGEAYKKKLMEFQEVLEHAKKVNGKPNRKIRPDNKLIRNITNLLEELEAEDWQDRAMEIVEEAYSVMVQVINCLQGEIKKSKAKKFKILMMTMGSSGDYKYFRNAALILNKAGAQTDYIVPHEGAKWFEEVGGKIYTCEYKVKEKLDNWDAARRWDLEALLSGMAEGTECLTTKRIQTEVFNNKYDMVIGTGITILGKTIAEYFACPYIELNAQPWFVQLYTHDETLAGKTKGLLDKMGKANVILANAKGIRDLRANLQMPEGDLASDALIDQPSIYCYEPCLSSDRMYESWPIVGYLGRSLIRKDQPECQKYDIVFTMGSMVSKNIPIHAETVMSYSKKHKLKTLILGGYSSDKIKPLHDKLSERDKELIHFEVYAEHEDVMTERTIVIHHGGCGTTNQALIGGCPQVIITVAFDQFYWAHKAKLCGISEHMDVDEPTDLLPGLITKLRSESYAQAAIMMKTRLVTGVAKNLIIGLRSLATQMDMLRTNPSTYEKITNLSPPLDQEIFSSKSLPQRPAITTQGPTFTDDVPNKSKYFKLQEEMKPLMKEWNFEITEPRRIHYTCCGSYGSIDVTLAENSDTLIVCNLENVRKPRFVYVAKEHTIIQPVLPFDTNRGPPSTATLAYHAHGEILHEQMKPYKATEIKTLAGQEQIISESKWLYYAAKNTRKVDTDYGNKRNGRGIDCRICYRRGWKAHPDLDICTCCFSKLEFPQIGNTADEETIKKYTILKEGGLNRQNQFQAGIGNALSLTTSVPQLSVGLYHGKSYGYSTKFNPQGPDGCVKKCIQAYVDLNTEATRPVMKNNRLTLIQDQPSIIVEEILKTFNMPSMTPLEHIEPYCHLLGLSTTLVIKGNVRVTVLPDAIGHIELLIIQTNKLLHCVLVTMNPAYLETLIRQETPRLSCTVQNSDSLTTCQICEQQTIDIKAGKGLRVSTQGKCHGLHAEWDRYLVACRRMIMGEMVDRGYWSDKTANHVKSVHQRITLEKITHVFRSMTEPVIFSPLSTGNDYIMIEKPQTIKPGQVMIANTEKGIIIGHTLQYKDRMMLVHNMGIVEPLSQAVINLRTTTLPRDYDPKDTDQGKEVTSYNLATRQTMEQIDYNLRYLPISLKGMKVILTDLRNRNHHNEIVAVNIEKARQFLVDQTMKPLEPEVIESLKYNGPIVLGLKNGRLEYQHNLVASGPVSGSIIADVEKHLTGLISIKPLEKIDKLKTINPNMFRCLGNEWTFEEYESELEKPEMGKDIKDIGELRDLLMQPGWKTRLRVDQLTPDNFPISLITRGAVIKNAMRVDPGVEVAYREHILQVLVCEEDNLLLKDKLLERDVDFKLQAAQDAIAEEKRRFESRPFKTIINSEETFETVRLLRKRNTVVETIQYQEYKQGLQAPVQEVDLTQDKRWEDMLSLRPPTNEVYVLTRPESTQMVRRLLEGKVTPQFDTVEGKVKLHVMAPNPTSEFIDLNLDYYMGTHKYQDNIEGLMESVIQMDDAGQLTSDMHKLVTVPSTLGHVKNLARLTGVPETPELAKLAAAILEANGRKGKTTSHRMVLEDLGEEELVQLLVPEDPVVIDKSIYSKIGGAVYKPASLVGFGLKDFQKEALTTRQFWNENETKGKYKLTETMTVEGYNKLHSNKPTIPVNVTSQGQHSTSTQTNITTQTTEKEILEKYATNEPIVVNQDTVTKYRSMKPNYVEPGCLETEYVKPRDITTDAHDSSVKEGEALGIINTNWMEEDKLLELLDSTTEDKSAGLWVEKVDMDHKLVAEDMNDKINVFTINFFEDNDMTDFNMMVAPTQGVLKSKETPCRVMETRKVTLTKRPTGSRPVFNKLANAEFMAVSRRLMSVVTMRKYQLDPKQEWDRFDRNYVSVMGKKLLRAYKEDQIYFNSEEIRKWISSRPDSVKIDRELEEMLSTGFEINAINTAKVHVKLESLLKEDYESVGNREIEHRIIVWQRKAWCAIFSPVFLQAKARLKAILSRKVLYADGLTQEELSSRVNLIHGDCWFMEDDLSKQDRQTDINLIQCEMYIYSQLGVADDVLNLWRRTHENWKFRGTNVSGILTGMRLTGQATTAVGNAIVNLLVHSRIFETNKNHIELMLLLGDDNLVISRNRIDSSKQSKISKDYYNMVSKASHDRDQGTFLQLLCYHNPQGVLEFGPDVIRLAQRYEVTNGVSESNNHNMLARTMSYCMLIGKTMGTKAVVTKHGLPIDLKTTCSMASARRACAIKRKMTLGEVESYESYLYRMMKDLKTHTWIFKHLA

SEQ ID NO: 1276 - protein, 5373 aa, Helicobasidium mompa alphaendornavirus 1
MDSLITPSTPNTTTSKTTIHTHNNKKQLLLQAAAASKERLQKATKAIINQTVGDVSQVAPIVRGHQLGGQNYVSITTSSGRKDQPTQRVNVVEAGETGSSINGHFNRLTNKNRKAVLSKTKELVKYVPKSSRSVGNKKEKATIQCKTSRNIYRKLGIYFHDDKLGDTAMGSTEMTVNQQYTAAMDDDSARLQFVMKFKSWIPTDIFNEFMYYVVYPSHVSDFVTVTKCAPQVQAYAAPLRKIDNKLLRYVSRYDKITKKTSKRNRKAIEKQRRANSIRNIGKDTVNAQRPKVERSVNKPVKKNNKRAKTQKASKTRNVCMRIIKDALESFAPIADAKTLYLSHFREVLVAEQIPLYICVNGRVAKTNHASLYNCEGALTYEAWNQSGKFLEAKDTTGKVFKFQKRTVFNMGHSLSMIAPWAAEDDDDDDDEFGPVDVIHPVCKNMWHAMQTTVYDPNIGDAIDGLAMARMPGTFIWDNSNDGLVEMYDHQAPDLTTWFYNGQPASPGKNGDVDFNASTNSRVRRPGPCADCYKKLTNVPKFWGWAEMWRNNAPKSSFRSEGYKEPTMGNGYEAYVNQKYDALYAPIINAKTILKPGKLVSVRTEFCAFEFNMEHPDRKAREHLLATAALHYAGRAWVDFDDTIQPKQGTCRKTLRHIANHLRQTKENLQSFAGNHFYVNCPRNGMILARTDRWVETTCERGHSNRMPYLLEGELPTTLCGRCGGSLSTSDAISGNTTDIMKGLIDQLGVTSNFFDDMTTSGSKEWQSNVENYDYRVVALALHNIKVLHMDVQYRLQKDELAHMKGMFVDLELTSSGVRGSLTTGMYHAVRDCLLVQTLKSAGEREVEYYNCAENVSRTVGHIAVPSDDSNEAAIVVGDWVQQCTLSNIMNEKKKKIIVVLPNVPSDMDRVSSAVTDMGEVVNYEDNMIFTFHDSTHVKTMHRSMYSDLRRARYLTASATYVSTTVRVTTDWVVLVLDRLDNKENIEASQPFFNTNSTGTMMKFTLPMVHGRGVAGLMGGFNIELKEFTVNKKLLRMLLTRNIYKGDISFSEMKVAAIGYAFRKYNTASRTITNMDVGADDVMSHAYLATVLTRRAILKREWVLDAIAEEYSWAAVCKQIGVSLVNVLMVTAIEQAGIIDRSTVKQLVNNFDQMTVTMLTNALGNNNFNELEDWLETDSTAEGIWLSYTPLELSAMPTCGHHNGYCLHVGDNICSCCGKPTNDKMCQCCTQGKCVMQHNCTHACIGHGDSTGTKCTCCGVDSDGALCISCVEHSATDEVEAWPWISIDKIIEEREVLAKSGSSRPNRAQRMDEVGMRTTKREPGTIYWHKNFNLWVIEPRTECTFTKGSEHQHICAVKINGRECGSLYQHTHASRRKPESLHPQFVGDCKRCWPNPVATMDPDTIPIPNPFLDKGKGREKSDEGGTQVPTNAPRTEPLTNDGPVTVEKPEVNEWFDMGLTALGPRYMAALLEPSLSEAFLSDQNMPQGTGSNFRYLVQCRQTIERANVGIIHTMLNSNLGSDCGYTALQMLFSDLVQPTLLSRVVKTKNNMTDEDILRVAPLIGYNIGVLTDAGLTVNKVSNDVLVYCVMYQAANVNTEQPAHWQPVLLQHLKWTNELISSSVLATKPILDATTNRITKGTNPHWSRDLLTEEQIVLIELALHDTFVAFELASHSNELEIIKVGSDYYLPNNTSRKHMVNTGLIHIRIPQWALNLMLTLTEPGGNDHHLLQADWNRDSDFDLSRDALGHLQAAIRVYNSFRLLPNQWGGKMPAHDKVPMYVNSGVVPILQLPPGVWKALDRIYYVTNSGLIPVKLSPTFIAGGWSSPVAPGIFNTGTVQMITLKQSCGSAIRTIVSLMKEMPHESTCLAKMRDSYMFIGPGGAGKSTRIAEAYKKGDIVVSATRGSIASLKNKIKVKDKKIISFENLASGVTTIEATVNTIFFDECTLLDPVLLAFAIESPYMPEIRFYGDNTQIANKDFVDCPGTRMEISLLDFCKATETTNVQYRIGEGLATEIDLVRPGGYKSSPGHKGTTFATMDVVMVDAKEVINAIKEHNISTVLVFYKKHAKIMKEALAGDASLTKVVIETVHKFQGLEAKRGMIIQARMGDRVYIENDPTYCMSAVTRFSEHLVRVSVDMHKGLLLRKRLGVSAVASGLNIFRSVGGSWDDVLANVQTGKKQMHFTYNADVDTDTLDVNKLQKIANDRARGTGVVIKHTLSDDKLNTVSMMFGRSIIEIDTDLSTMDSKVVSDTMGLVETYDVIKELHNSIKEAKGSEEELDMHDVVHISHLNWTVLQGLVGALHAMQGVFGTVACTIPNYNIASNGKSLSVYYRAQRVAVVRMTAAEQVVDLEWSSADIQVQNILVELGLDPTHRPNKVHSLISNHPYGNLHTYMSFNAWLRNADKAVNVLIKKLVAMDGLHNLTHHVNQKWLDKLDTAVQSNVSSLTRVTKTSSADNQVGTPIVYVNEARWPIIVTMSTTNDIRMSPLHEVLDLESDFLLTALDNFFDSLAESGIGLLLRGLGYNLNTRMAAGIEGLIMPLDQHKERGDKVYHLVANTQGRLASRALKSVAKPMGLPVNLGTEITNLLKTHMPGLSVQLVQSAAGVDQLYVLEQSVLMSLHHHRDEYTVVTNRPATIMMCGHQNSVVMIEPWQHNGMKLHQNGIRIFSDHIANLLNLHVEYAKDDSTKPKDDNAAYNLYLVNSAKKNIKALDGPWVTRSGNMRDQIIVSPECLPTDVTSVETVLHSGNRVYTWVPDLNPLLKADAIEVVTAGGISHIKNNGISCVVSLPTIWYDILTARAVHHTPKGMLYAETLFTLGPTRVIQLKMQRHRFLLTAPLDHAVGLGMVKVRVPVVDLDLISAAGHKGILTTRTFTTPMRLIRHLSLVLARDNRTFEDLRATARVILNGETFTAHNIYTRESTSPSVALDTALAVMLYQGRMINGLQTAMAELQAIKYDAAHASYEHAAANVTGVLGRLMSASGLNLEPREVLNAIAETTPTHDLNILRQLTIEWDKLVVQQGHVSREVRQHDRVGNTTSLTDIRIDHTGTVAMPDSIGRFVYNNLRYIAVTTRHGPITDLYEYPTITAIRGPTATLGHKKATSKVLQPMAPQFVKTPQAPPPAAPEVTYEDFENMWTITLNKMSKTFKIRHPRHKLWFDSILPTIIAGRDAHDGAHLQAAVKHFEEEVEDALDTAGLTEWERLVGHNLWLMNLKMPDTVWVGKNEFKDMLVGITAIGTRGDMVPTIAIASTLIQAGADVIMYIPHAWVQDCMKIVPLATLRPGNWDAAEKLALAFKANNYNLEAVNTILNSGTSHNILADVDWKESGFVDAWIGTTANPQARLLSWAHNKPYLQAQYLPVFANETETEEWYVTAYRNFMTNQITLLNLPKLEQLYQEIRGIKLDTTRFLSAHYGNAIMFEEELSGMERGPNNYRVGSMSRPLLGQNLNTLSEATGVLLTFGSMLDGVPDMTYMLIAEALVRTKQRIHDLHLINLPVGRFEQLGLVDTIGNEKFLNGRKIKIHSHNNVDLRSATKMGLIIHHGGAGTTIGFSETRVNQVIIPVAFDQSGWGESITKHKMGTCLKMHGKIEEYIAAMDWYDGRHDHAVQPKPGTCDRFLASLVSEINRGRSNHDILAVPHVEDQNVFNMTANVSENWMDLMRYGLRPTDWRHQPEIPLVPVGWHVGYATSDPSIKYDPAVAGPCTLHAIAYATKEELPKLESFAKRIGLNNLTTGALSHDVLLMCAILGFTGVVRDGMRYETMNLNNGPLVWFLNRDGHCMVTHPPDVGSIKWVRDALLPTAPITSVGTSRPDREVNGVTMPTTAVSWSHSGATHFGANPRQTLSVLRAFCRKTIEQLRDGNDSIATTKLRQTRKMMQRINRAEYVPTEFTTWGVTEADTHVVVDKCKPGALYIGCDHNGGAHWLIGAHHNAEFILIKDTDVKMLPFFFTTYQQIVRFDTTVKHIVGKSYGNSLALNRQTAKYMEELTGEVINVVGSYNVDKPVIVTDFGNYQHHMYHDRDKLMEHVNQIHFVSTVGGVVTLRQDPELVNRLLHKGIVSTGLLRGKEMFVYHGRSSHQMHEFLKQHDASTQIKMNSAWFSKPLSDNRLKWLEAQHDWKDDGAGNMVWQPKPQRTPIKRQYHHQELQLLAEQCGSLLAETMATKINETDTISITPYYGTYSLEIVHELEDHVIFNDYGDLWELRWEAMPLLLNTDTLATIAKLNNNTLDIKVCYDANTRVGNSTLVTADKDLHLNNPHILYCDGTIAELILEAKRSGITMTNRRCECANASLYNKLAEAFDVICPDGVRTGREPRGSLHFTEDSFMTSRDPEKINDLETQDPAMQEINLLHVLEATAPCPPNYVDGDKVFSTNYRANATDLQLFESINTGWFLHTRILNPNKVEKRGRGEFGITNGNEQDCFLYEHEIKEISELKTKLVIRDVPHTNPAIIPLPPEDWMDDRGMRLPCSPFTITGLGNGKTIIGYDALLPTYEWMDMWWQPGDNKLPTVLANDDWAKELDMRSNVDTGQTWAKIVNNTDNGWPNLLRVRDELRPFPSLLGATVGSQWEIHATPEHWAQDMERGVWEGWTKASKVTVYVNTTSSPHTKVALAHNSMYTMNPPCVVSKTVMKGRTDVVKELILNRQYKRERNTWDFREHQAYWHKASDTGEYEQPESNKEFQVDFKIGQTTKPYAIGAPPGAGKTHLSKLMPGKFADHDDYLDQKEHARLVAAGDMIEVSKFHRNVSVPTNKMLLTWGPFDTPKTHQFIGYVIPTRTTHSVNVARQTYQRAARVRILTQTVYPVVKIDRVHDFGAAVNKLVQVYEGRKEKPVTDYTFNGVESLGSFIYKEGTEPPTPQVNHCMSKNPWLPYIPPLNTDHGENEGIADEAIPIQVMNLWEERDQTDKVVLFAPGMDNKLQKPHSAEQPNKIITTTKVTLKRYPVRSRPVRTKMFAAQTKAAILRMENRVVYKKDELDVDLELKRFAEAYFKTGWQSIVERWQPLYFDPAAVNKWLHDHPGSDKLAKEVQEVLATGFLDDPLNLANVHAKLESLLKSNPIMDWTKEQVRIIVWQSKGKAALFSVFNEAKNRLKMLLNDKTIYADGLSPDDLSARLRAVPNDGAWILESDLEKQDKQTEGETLDCEMEIYKRYLKVHYLVVNLWRRVHDLWRYKGTHIRGMSDGMRWTGQITTALGNVIVCMLALMLMVILMWSSLLIILFLGDDNLTITKRPPDATSLRSYIKNHWNMLSSATVNKYHGTFLQMIVAPNSIGTFDIGPDWVRLRSRFEVTNGGSSDPSTTVLERCASYAMMLGDTDVGRRLMDKLQLDLPLVAWYDVPSITLAIQHKYSKPYEWVRNELAELEAMITEPHLYYQEWEHFTTV

SEQ ID NO: 1277 - protein, 4663 aa, Hordeum vulgare alphaendornavirus
MNSQYDNMKNYYNQMTKVRILGRTMVPCALALQFPMSEPLVNNYMEASYIATYKLMYKNKESYEGLHPHELAAFIKGVRLNVEDSFNHAGNKLFYDSVEQEVSTHTIDTPNDPILWQAIREIEAKYGGAIGMQYQALRNCWTRVPHLAKVGGRHQLLMVDAEPCGHRRCAECGIMNGYWIPGEDGLSNAHCGACGTSLDFERQTPEPLDTPPTEDFQQINQPMGAFEMAQMEIIEQLDGVGDLEGVALKQAIENDERLIRAMISRANVKLSFVDPGMTPEQRKLVGSSFKNFILIDKVGPINEHAMIAAERQLMAQVMYDMAAGGQPIVDIGGPSPGWTAVKSYQTVSPILSIKDIKRFNNYDKMPVHCTHKLKECSCHTGQAPLIMSVDSLYDISPKDVMKFMLLAKSNYIVYCLSTATLDHSTNKGVLPWDQGLWIKHQGKLVTTFNGSSSTYENNWAQTLWWTKADVIIVGDHSLCIQTLKVCGNHILRVATICNDYKAQFFSLNKPVIMSSSSSVCMPIPVWKNPISHVVKNVVEWRTVAVEKEFLKLLLVRASAGQCSYDDLVKYAIGLGYSKYTLKDKVISMNYITADMALNHALIAKAITDRKLLESTYIMAHDKQFYDWHNMSQTDVLQTMGTLIFEITKHLLSKWSASDDKVQFVFNKVVDGISEWIADPAWYNLVEAITFDDITKMNIIRVNTSSPDTNEAIICDHHSDHCSHTVQLSPHYCQCCGLYPVVAGENRCGCCKSDHCHHKCHHKCTNRSEHLAGTKTTPRECTCCGVEYDTYVCVVCNRPDGYSVVTDAEVRKRVHEAELADKQRKSNLKQSKTQQSLEQEGDTGRGKSATKTHSADPDPSTANATNVAHAAPITEPTAPLADPSSDQRNTATPTVYDLLKLHMDDLIESSTPRLYSDVLSSSTAESTPQVNEQPTRQGRDPPAVETREPSINVVKPMMTMSINHPTDITTITDIEAGNVEGRLFLELVNLTSLEFAKIIADNERGWACVESETEVNHTKGLSQIKYVGRNITVTTPNNFEIVEITDVSGQGNQCGYNVINDTVGVDNDVWTSIISSRQMYSDMEVQQYCTMMNLNLLLLGRTNTFFHRPNTASDTFIVMRHCSLDSPEGTPKELWFKHWQRANVKVKFSRPWVPIFYPWLERAAWDRFMLDNRINEDFWQLATEQRLQLMVEFYTNNFVCSNLKEGYLAMLTMDLKACPPVIYNNSLMMDQPDTHLKGCVVSKQGAAKLPYALTQHQSIEQDSIMGAPINQQPPTNESELEVWLNNEIKLECIDYAYNMEHMMLLEEEMHFKEWQTVNVKFVGQRLRFSKGLFKKIKTGDIIMIKVAGYKMTTTVTISMRQVLCDKPYTGPTIDQALVGVNKQSHASKMAQVMTLLSKTLDAKHIWDKLKSATVIKGPGGSGKTTGLLREAHKGSIILTKTTMAKTNILKHNPPCPVMTLEAYHKKDDQHTKILIDEAGMFSLLDFATLRMQTNTQIIMSGDLFQIGQLITHVHPGIRDYQPCINFPANVTTLNSTYRYGKSVCDVLHTAGMNVTSLAPYDTTITLLDIKEIRLGTIKELVKKYTPDAVLTFYQSQKNLVESWQLDPDTHTVHEFQGNECDTVMVLQGPQATATTGIWNKPEYCISALTRARKHVVWVTFNATTGMNMVQRCGLSPELRATHNTTSLTQTWADMVEEDQTKEAMRGGGLNTDGLTIYVGRNTNHVTDLKSMTTIKNKTVVGDEELFVVLLQSDWLMGMVDENKYYLVAGQELATMKEPKNVTDWRRLLSDLTISEQAPSRLLQAASNFFSATMIFKNNMVHLSEDRAVLYVPDTQAKLTELEQKIRAKTKLVQITRTHKELKLHFLLTTVGTITITGRHRIEVFGNRALNYLTSHVDQVNDAQFKAWVAHLIDNFRCTACAAEMYIDPVALTEHLSNPNSDTQWTGCSRWSCENFKAPPSSEENSIEDVMDTESSSSEEEPDKEPANGGTLLGDEAATGQECEHESDEEYYDTIDTIHVNPTTVCTTPHNRSGQDDVNNEIVQLMSIAQPSGGQTAENQTATTSRTHQSSPPPNPQQQERTLNNLVVSTLHNNQPRRTSRERVMHLVEQYAQHTTGWIIFPRCISIRHMQTALLHGCPMHCRWTLQRNEMCNIFTLMAGLTRVLTIAFNRAGNVVGPMDGSVADDMYITLVTHAVDQWRLVASGQMELDEDLALEGLKFINQSRLSPIHVHRHDTIVIDDTEWPAWIGASVKEYEPFMTRPRYQQSVTHHAIKTMLPELPTEVCGCETKILDENKICATYPWLDTYLMTPDELASCISWIQFVQYRQIGGLKTHTVIDGTVVDSTTFGGCALCAGLKMTINEEITMLINSRSGPEPGTMWVNINHVIQYPHVISELCKILEMPGMIMHYPDLELYWSVRQLTEMDGMIQDFGQAMSLIERLRAGVDWVIERVTSFSLQWKCDQYNTVNSEYVTMLGKALLDAGVDPSLHCHAITHTGTLLVGLPTRWSASGQTIVISKFKGRFHCTSHALSITQRWEWQSASDMLVEAVKHRMLILFANKLSGRRELVRSILEDSVAINLEEVRRAMGAVKLNLSLDYHREHNTGVNAMLNDRKNKLVQGQLVGPHQAMYLSPNQIRMFGRDINRTCCTHNLTEHGTWLPDEGLFATAEQVAAKIISGWCGKNKLCTYSGTYSYIPLVNSSWNMKSVKPLRSTPLYSACALAMNGALNNLITSIKNLKDKAETVTGFALSDNEKALIAMCDKVATTKTNPWCSSESVSDGDKAMLGSEYLGLDWHSFCEQLVKTSARETFILVPEQDNHSGDYYNIHDRQEYFECQGVASTTLITLNPTTWSNLLIKHSMRYNNKIIHAEQLMSILGLRLVSIVVTSPTVSVPGHYSPCIPNNSNQVVYKINTPQLSWNTSVFSHHKTTVKVDTKMYRHLSFRVVSDTCSFEDLLSYARTYMQTTTYTQTGYYRENLDQINDLHLICACVYHEYQQKKTSWCTLAAKHCDLPTMDVGRVMTHLNTNLTHAAFKLMQAWKLNDGTLHDIKLASKDTIGPEMTDIIKNLATMNIEKKEVSRQIMVQNGDRALPDITTNCPCERQMTRSNDVVMPILGGLVNDGSLLTEFLAEELRSNSSYWCLIQSSTDGTNTAVQLGDGVRRSHNLSSVNLKKKRRCKHPGGEINLTEKYLQQRMEITANMSSTNDTQSRESTGPPITGTYSTPTMNRCKTSGHEPSVGNLQQPAASNNEDEGTTESTWRLMELSHVIIKRVSQAVTSRVGECRQNNCKARSKEIKRLLKDLASAVCHKCNTWAEEHFATSKGHEESGATEPLNRTTTPEPTPGSTRPTGGERVWVLMSPTQRVGIVMQELNQAHPHAELSQLRTVTSDKSHDNDNMDSAIRAKADQLTELMESGFLSEFDRANTISSCDDNILECEEPTTFVKKQWQQCNVDCVITEESHTQSDLEEPQLTTGASEPTSSEAQSHNDKNAYARMCDKTHKLLCDTTANNAGLMEDYIESTTLEWLTEEARQANRTCWCHVTMPECLQELVGIDACHVVVKPYAHITGVATRSKEIYNPNTEGNCVVNSLNYLEQRHPRVDKVMERACGVYGKTMWLTESDAAAISWLCNLETRYKHNQTVHELATGTSAAPLCINRVAGDAVDHCTVHNTTVSHRSEKPMQISILSRATTIEIEQNMCTHLDIQVGLTELLHDLNELVNFQGVDEFVAKYRSSFSTQRELEANLRLTGQVHTIRTKSTPIIPGEWVNCARLKYFKNTSDKLKPGECVLWTDGVHMHWAAVISSNRHGQYVWTPCPMTTAVPVVLRISMKWAKPAPQSPIATNTILGEIQHVTALNEATARHMVSHKLVVGKPTINNPHATVLVVADFDNRKHHKFDDRTVLRSWNRENIVVINKCPGRVPTEVFFEDSDMMTAVLYQGDPEIHIVTDHTSTAHWVKSFLMRNKTRSTVKRNVVVISDSWHTLQEKKTQERLQPHVHKINDMWHLNKLVPGTFTIGTEQELCQLLQITEPDLSVTGLLANLPLQLTIHTAFHEPLMHTSYHRSQLIMVRNDKYVRSGFVNKIQIKAAQRGGSWMEIPAGTTAGKWWDQEQDAHQLPNIDVSIGKVEAMVGAAITNIPSTQNRTSTHEGKTAIIPWMDYPMYVDTSIADTPALELVPAQIMDMWDTTDLSGYLDRFAPENQFSIKVKTVPTKLAQSIKSTLVKYPIYSRPVYTKMANQEFNAVTGRLGKVTQYRVGDYCAISEANGIANTFFQKDWKHVVAEYQSNTITYNTDKVKEWLQGRPNVESIVGEVNNILTEGFMKHPINKLNVHLKLESLLKSQPVVDHRQTKARILVWQAKGMCAIYSPVFKMAKDRLKSLLNTKTVYADGLRPDQLALRVMQADPANYIMENDLEQQDRQTDDKLLDVEMAIYHMLGVQEELLSLWRQCHNNWNFKGRSCRGERNWMRLTGQATTALGNAITNLCVHWRLCSKLGNDWKLFVLLGDDGALLTNRTLSNKEVKTHGKLLYNMIMKPNTHNNVGTFCCFNIYKLPTNRWTMGPDIARLRRRFEVTNGASEATLVNHHARCMSYCCMLGSILPIQQLIKERGYTVEPPMWYDWNSNARATEDKYHWLPGKSDTELRMLLDMMRQTNYIDHKLLHWVEATR

SEQ ID NO: 1278 - protein, 4884 aa, Hot pepper alphaendornavirus
MTTKLSRPFALQLLGGSRLPKTQTLHGCTGNSIPMKKINKKNDCSARKAFRRSKFKFKISKQKTICPAVMAHRLEEELEFVQFGPEECVPDLNKVDIRTIRNMMLLFEQEHCHVDVTEEDVKKYLQQSQLQSTEPFYGGPSKMYYANCRPMLLPPSKIDGTKTEAASSLLTGLIQKFGGSVINMVLLDCANNYSMTPHVYKIGSSYGYKAMELPNVEAAMTCACCGIVNLVWLLDETEGLTKSRCGVCLQPLLIDKMLPECIAWGMLEVVDITQLRVGAIELNNAEITLQLDGQPPLSAATLAKLIDQDLRNLRSVMSRAMSKTIYVPNGLTDYQKKELAIAVPAYKLLPMSGTPNPHAMLAAERRVCAVTMGDKLKRGKKILDIGTRANLTGNDSWHGMGPCLDWRDVERYHNKPLTENTCDHTVKECGCLDGEQPLSISVDAMYDIDPADVILLMNRTGTKQLFFCLSTAEVDFDRTNGKLAHGQGEWIRHEDKLVTVLRGDDRPYVNDWKLTKLWSTADLIQVGHNEISVQTVKVLGNHIIRVATLVPDGMDCLRTRQVGAQNLTHLDIVVPMIDVESWLNVLGPPKMCHKTMKLDLALYRALYSRNLTGGLSFEKLIEFGLGYAHAKYTTKTTTISHQHVTADDVRTHALLACAATRRKFAWVSSALKLNNNSNVFGLDPIEVTKLISVDLAGTLVIDLWQKMLPEGFIKNRIDDLVTQVTSWINDSFWDTLDSLSGQSKVFTPNVYVWPSTCDETVLNSERVCYHHQQWCDHPIALEDLCECCRLVTSLPNSSRCECCTVGTTSHACQHKCQGGHIMIGEAAAHKCKCCKLNALTDPCKCCASKITKHPDAQQPIGAQVYAEPQRDMAKKIQNYKYQGLNKVTSLPKHTQSVGATAGEVQELDVPQFEPTPTPSSIIGLWKAEREKRSIPTIMDGGTTSSPGYMAPSVRPTEDPTTNQSGEDVSIILPNDREFQKVVLELTGLTDFSYVSNLRFGYTESVASQLALPNEPNPEDRIGLSELKYFPMGMQQHHPDLLTPINTQSVGGDGLCAYYALEHGCGIKLSLEHMQSALNCKQQFSTLQIIKYGNMLGYNVAVLTEEAIITGKVDPTTDNFVCILHTFEAETGAPHWQPCNVVQTGDLESTPCYKGMFKQSTINKQLSLIPSDVQGTELNKELCKIVLQIIKRTVPKLSQLKFGRVEINMNTVNGVHMLSNNRLGRHDPGAGLFSFAVGEQDVGLVECLCHDSLPLHELDQLESPLNITTMYNCDINELRTSLMRNTVIQLRQTLIQAKGVEPRSEDAWVKVFALTHKIGKDTRLLMLQDTKIKSGDVISVDTMFGIQDRVVWKFNDGFQCLDWLPPTIGTQTIKIYINKRSFKSGLIKLMTLNRPHVKFDQFKELVMSSNCIIGPAGSGKSTMIATNWTDGTIAIAKTTSAVKNLQIKIGGPKNLVMSHEKYAFSCLPIHDLVIDECSMFTWFDLYFSLVDLPRSLTMYGDPHQISTIDTFMLGGERILDNITDYVISKHTLKTTYRYGASICALLSPIVGELSSKAKHDTKLVDLNLPLWDNDQLKKIVKEHDPDVILTHHNLTKQRLAGLCPNKRVETIHSFQSMEPNNVMVVQYNEGGNSKIFMDKRYAISAVTRAKLSMVWVSIEVSNKMTLLDKLRGTELDITGGGEPSEEKKQSETLQKRLLEALQSGVDEEAMAKPVFPEVGEGSKSVRSHVEYNLDQPETKLDNDKFVTMNDIDTILDNYNMSKQPLLIYDGWQDFVERWLNTLPKQARMVADERTGVVTISVLGVKLIIVVDKEREYYSLQVESPRWMFNVKNSVLYKYKAGLREEWVKHAFGKKYSEVLLLLRPAHRDWFKTVLQWEPHFSIVRVEPSNQPDDKGKRIAREVDSDGDEWEDALSEELVEETVTNIETTTLAQLEMNRLIQDRQLCKNYPALAELNYEQISTLLNPSSPMFYPMKSTSVLALVNATLPNVRLTTIIKEISGGFELTISTTAQIVAIITVTGHGLQLTVTGGELSKKVQESILELKIKSYNKVAPYAGVWQTERNLTDEQTQLIQQWYPWLTFMADAQEKFGGNELKALLNQDRFDVPGKLNGLLKSMREMHWMLKEEGVVTEDDMDYVCQICDDQCMHYGEEVKLESGSIALELHLSPTSTRILRLCSEWATLQYDIGGMFTLNIQGEKVKVAAFGGCSICSGLKFTCNNIELLRISPQRKVGNVRKIKINCVAYPVLLQSIMSAMHISVVELNAEIDNEPLYVDLLAEMDEALKCSWFELGMLLERISVAPQYLWKLLQTGESSSACTIFEHENEEILKELTLHAPNIEIPLKSSTPGHRSLRGRPIGVKYKGVNFVIMKLGDKFSCDNQLMAAKYAWTYVPTMIMVQRYFWMQLNRWPWVIAKLITLNGKLANVGLGHDFDMPINSLNLPLSYHEANNTAVNRFLVEKRGEAVLSTMKKTYHIVFVSKLQLQNYGPMLQRDCDGMPIEEQGCETIDQGFDMLTEQICLKYFYNGLSRGEVSQMITDYPYLSILTSSWANFCTPPDKKYAFRYHQNLADCNNMMEKMEHSYGIGKQNTDGSKEKDGNGKQDILECIELQHKEGRGPWFTNQADERVKIMSQNVLMGLVQCRLNPHELAELMKNGNKTCVHMIMPQMIERNNQLFGVASEDGYQFKFWYHNSSHLTIINRQLLTMFQTGQCVTTPHGTLVMHSANRILGHCMVKVLLLPNQAKLPKYVRPNMHDNQQKLVKFKMPEIKNFKQFITTGKAIEYKEVNMSLKLYRALSLRMLRPGTTIDDLLAYARTYSHTVAYTISSRSSQQPQFVTELMECCVCVYVESVKLNSAAARVMDIISSTEHPIDQLGKIKNTIWFALVKVLADCYKWLGLDTTVENLIELFTSVGKETVGNVIKNIEKLVVVRISKIDTADPIICYHDDIDQHEMGKITLDDTRRKVKQVLSTIKDSMSWGEEVRRNRVELVDNNEQHMRNPVSTSYLTSRLARRVGKDRDEELAKLVPEMSQQYNSSEMSTAVTRVIKNVARKLELRTQPNIVTCVGDDRWLSEESLIRKGKELMNDCFTLDDLRKEINEMRWMYPDECRTWENKLVIFSTIGSRGDIEPYIAWSQVIRELGAECKFLVPTDYVGYVNNFGFEALGLQVNSQDLITTCISAERSKWNPVKLYQVWKKMFELIENLFKFNHQQLMQFVNGADLVVETPFTHIGVQLAQKLKVPCLFATAYPWEQQAGMTTRADSMTIMEIIAGVAAFAPFKKHIQEWRQNMLQLHNERGIMVHGVGNPMVYLHPAKTKWWRTCKTSCCMGYANTMTDFIQEGDKELCILASEMKSIAVCFGSMTGKTRANLTSKLIDKLDSQFKMIVVDGSYPQPLNKPNVIVVREANYNMLFSCVDIVITHGGSGTTHNALRKDCVVFIEPHFGDQLAWMKSVRLLECGESVAKLLSMPIEQVMQKLPNWTRNAKIVGAQVRKEKFYVNLISNSTVLWHKAAEHTTNLLANIREPTQSLEVNTNNDVSMLKRAKLKWSDWETEATLTTRLLSKVQPEPQPCHQHSSGQPSTSSDKGNTPQGPRLQRPARKVYEYSYGGEQAGFDMPEQPSGIEVIERQELRTHLGIKAHGMGSQITRELPQLIAGANTNNNDKSTSDESSSSQPSNRANEPPTTIEDDQTTTDVEVVEIATANPEDEPQIELVTVEQDAQLTTTQSEETPEVHFPGFSIDVTDELTTKPGLILNMFDLKPSDDWGPPMEVISMNNVRAILEPKSQFECAKEVLTMAIMVQYELTEEKASHILQKCYQWLKIATTPRVEDMRAIICALDLTLGIKLPDGKLRFEHKGPTGETGFAVFITSGVSLGHCILKQVNILGSKPLNLQKCVQMELSRETQTELNELFKRYGGCGDWTQQNLPSLILSEDLAGQVWAELDTTYTREEFLYKLQGTNLVHTADRMDQPLTITKCRQSWSAVFCEEQIVPDRWYWVNDGGTWQGAIAVQLKRHKVLLVNSAEQSWGNKIVILRTDIRLGVMKPMQKKKPIHKKIIVPGDCKVTALNQSTLYESNLNYYGIALTGIQDDTCDLVAVYEYDNRAHHKYDDREFLTKMGPEKTIGSGFEMTAELWNKITNREMPLRHMIHKGKHKVALEFSNQAQRLTFTAVANSSELSYVVEGNCVYIAMHTLQPIKQQCLEEWATYMGASGGKVPHVDDVLTKYSQWTTLDKFLQEHGNDVNPKHVLGNVNVEHSQVRIMIQPGRSTTKLTNIVKVEMEYDPPALIHRNLCVTLEVMVNRKAGGVDEPEFWKFAGDFKQNSVSRWWDAVTVEKPKTKFDATRFTQINTEALISHGVTHSDFSGWSMPGGDTGDASNMPYVAVREWSNVVDNEIATVEIASYDIMSLWEDTDFSDWNEKFCPKNEAIVKSTIPATQLKVTNKYTMVQYPIYSRPVLTKAANQEFNAITGRLHNITTYRRQNYNVAKELQKFVFTYFDASKADILASFTQNKLTYSDAKVLDWLRDRPDSNKVAAELEVILQEGMQLHAINRLNVHLKLESLLKSEPANSLKQVKARALLWQCKGYCAIFSHIFKEAKVRLKQVLKPNIVYSDGLRADELSARVRLTTGVKYLLENDLAQQDKQTDHEIIRFEMALYKLLGVHEDVITLWHNSHFNWKYKSKSVRGEGDAMRLTGQATTALGNAITNMLVHRKLVNSLGNNLRLFLVLGDDGLMFSNANVDVSKLNNETKIKHNMMCKPHVSNTHGTFCCMIACITQEGNCSLGPDVVRLRRRFECPNGVSEITSDNALARAMSYYMMLGATPEVMGEIKTQNLPIQPMRWYDVDSIRSAVADKYNMSDEQVLNEERQLLKMLRERIYYKHEVLHWFEGM

SEQ ID NO: 1279 - protein, 747 aa, Jiangsu alphaendornavirus 1
ESHKNLFIENPISDVEFTPIDNRLYVTNLYGYDRETINNWFELGNIENNSISIFKYYDETLNIETRPYKIEELLNLFKIEIEDWIINAIKDWLEDLKLDYETTTLIKTHKPMKINRWSKIENDRFKLSGEYIYFIDNLSCFEINYKGSGVNEATAWSQFELDYKKKNEYENKMAYKMPNVVDRSTEMEKKYPDLKNLPGLFIDENCVNPINSTLTTSTHQKILIVEVYPNTNFGIEVQPINLDDIPDVKTQDYWDNFKEQTDTTIILPTNKNFKIKCNIEINSLKMCSKFALEQYPTIARPSMTQKFGEEFNSISSRQGSTKDYQEGKKMNPLYEFELIKSNYFRPDWRDIVNSYISSPITFDLHESLNWISEHSRTAEVAKELKNCLELGFEKYQLGNVEVHGKAEQTTKVNKFSRWFDEVITRSIAAQNYAISALFSPVYKKIKIRFKDLLRNDIKYVDGMTTEQLNQYLSLYPTCQFIVEDDLTAQDCQTTTEINDTEKIMYEFLGLSDSISNLYMLCHKNWKWKGHGISGYGNAMRLTGQVTTALGNAVTNLIVHNQFVKKNKNHIKLLMLLGDDIIMMCDRQLNVTAHGTITKKIYNIISKVSQKYRVGGFLSMILHTLGDCPQLCPHFRRMRHRFSVCNYSFNDKERVIKTEARTLSYCFMLGNIKESKQLAKSLNENVDIPNWYDVPNAIEANCLYDNINEFAVRNDIGYLIRLMKDRNLIRYNALMPSNLQWKSFKNNQ

SEQ ID NO: 1280 - protein, 4974 aa, Lagenaria siceraria alphaendornavirus
MQYKTDAITPYRQKYKDRPLQTLNKEVSSHLQGWIRLPRNQSVTINKNPWIRSFEKLFKHKPDQIFDKNKMKLVPAIRGERKIRDTVGTVATNVTYDDGLGNVINFNELHPLDVVKILYNVNCLGIELWKSDCYSIQDFLTKVKHMELDDDEKDEEDFLDEDDLDDKLIVKMVKPGRGNCTNEILQVLDKILKRFGGFEGYYNYFLENHFKHFGYLEHKDDGSYDFHSVKFNPLKICGVCGRVNHYNQFNRGLRQVHYSLSHYKQKSKALKEDFLTEFDEHNKPINIPWRCGYCFTDLNYTVIVEKYILVKMIEYICNHLFVLQGDIEQLLKLGYGDIYDDLDIKDKEAIKSHDEIVVNNYFYHLQRKIITVGQDFDQASHKIINEVLGGCYFRPTSKLNSIKPEFIAELSTFSEIIERTLVGRDIACLGNVLPGTSRANIHNWFHNQTWFSKDPEVACSSEHICGHNKNYFIYGNLGLMGEPLHNVLNIVEAQRTLQFISPIMTTSRTLPDGTGMFQRTEDNLNFYLDGNPVPINFKTDTYNALNYYQIIKWGNKLYHVIEVKKLSLTRLMVIVGPFNETVDYPRLMVENERGIKIQIKLPDINSFMGGVKNLNYRPNIFELNVNLFRYLCMRNLNGKVSHDTLRSYAVGFSLRRFVVHNKVISNPTIAYEDLDMHIVLSRVCMMKLKNCFEISYNYSKALKFLGPFRSMIGDMESALTASVIGLMGEAMESTFGLKWETFMNVIDGARLQSMLQGISKQDFWEQLLQLTENIKTTPPRVLDLERKAEEELLFNLQSCMHHSVNCNHIHAKTENRCCCCNLPITTEIFCNCVNHNQVQTNLFHTEHYGREENVHEQQIVNTTTDKTLDTIANIIMLAMREPEVTARRAPRRVQTQQPKITTTELNQTQTGIDQLSLKSTKLDKEKETVDSPKSKASSFKSKTSSIKEPLAELDDWKRVLRRGREKPDDMANIILDNIMTSAEHITISIDNVEAINILGYDFVRHCCETVQYENDLNDGVNEVYYLPHLPIGSSTLPRDSFEVIDKVYIPNSGPMTCAFDAYHYSNDPGSLQEMIDILGAQPPFSTEHLGLYAKWRKDNIMVLTDNHVHVERYNETSNTFAVILFEHGETNADIGHFLPATIKRVKPTDVYYYHRDPNSIAERDHIIKKRYGAMYSSSCLPPWTPRDNLSCEIAYYNITVDVRVSEAMQPIKLEQIDGEWFLSNNPEIRQHLVEKEKIHAKLPKIFEKYISKIEYGLKLQLPVMEIEEFRHIDKELPDNYDKELESELLEILRVFARLSELTGPVKFRDIKQSHNGYLGSWFGKSKFHIPSGKTHKMKKMDVVMVRINNKFIKATIVGFDRNNPVLDYVAVCEQKATLIELKESMGSQIRELVGLCQSYIDMKTLKAKLAESKFLTGPAGFGKSTKIGQLAIPGDLCVAMTTSAVKALQAKVTKGVKVMTLEKALYSHSKTDQTLYVDEATMINWLFVGFLITESANIELFGAENQIGKRDMSKTPGIRYNITISDFIKPENKKVEHYTYRIGEPLATLLKSVEPKLTTRASHKTTYTITVLDPSLIENISNIIKERRPEVIITPYSYNRNLIEQCMKQERVPVVTTHAYQGVEVSRSMVVLKADAGNKWDLNGNPEYLNSALTRAKYHVDIIIYGNYTDVTSLEDIMTQVGGMDFDYLQYFDNTEESSSIIEQRQNQETLGEQRKEAQMQSKHLPENITINTMHELSEEMVNQLNELQISMQGAKLSYQKLNGGTSVTAQFAGSVISKVTNIEGVVTVEANPLIRGKIMQNLDTPIDIPELVKDHCDADSYSVECKMTLRQTNKIRELTWILDKTIDRESTRTINGTKIKMTKTASCPLFAGIVFETENEKLAISNGWYHITNRKITLNKEKFYPGLTPVIKWLQLNIKELILDSNNNIGWLQILKGDMAHFLWQLKEKSHANTLWLLNFLTESDSPKCYYNNIINTSKYNKAARSINQPMVSNHPSVADHQNYIIKKQKWLKNQEIYILTDGNQVILDVTTEEEGTKWEIFAVECMADMVKTGAGLQGIAAAELDIPGLMIPLHKHLALGTTVQTIINNNLLNLNKQTRPGVYDVVRLDKQNYGMHKHYLKSRFPRMTITTGNYEITNSGIELALEQILLNMRGGLTENSKGIVAYCGLCPISICMTGKYYIKIVLPDINSNIRYMYDMQKPQIDSMLDNFNAKRDAKTELYWDHETKCERILAGTGIYSLTIEEITKLLDKTECMYGWIPTHAKNTDEYIYDRQLNCYGYRGGRITNKVRNDIINKVNKGEPVLVRYDKSDYLEATIVTEVFNHRLIKLQYKPIPACNYIDRRLGTYMDINNVIKIKIPWIDLDLFRVLKDRQIVTIKELVINKRFLRNILLRLMTGDDTPHGALEYAKTLESTQVITEKGIDDLTASNLLITLNTTWYAIYIHNSYLEKFKTLIHYLNYTDGKPVAVLMLEQILTGIGNLMGVVSDKISEIAEQFITYLNRNYNLTNKMADCIKEAEKTNWTPETKQVYFNRFYFSKDEEFTLRSWLNWEDEPENEDEQFQDLDYEESENDPSIINVDPTSLPNVAYKTNETHSQEETLEEKLSSATTEATSSDTSSGSTTIMTICPEKPKKNTKIPIQVMRYIDEKGSTIISRKQTVKSIKKLQLYGDFDENQLVTAAQIIDKEYMEFKDLLDTPWNLKILSEKLEQALNVQLEQKYEELNPNTYQLKNYYKTKQDHFEVEFSEHFMVPKIIWFYWHSIEAPEFIIRCINSWATHNKDYRIVLLTSEDLDTIVPIDIKERIQNTTTTNLYLTGCELTYYLDNGGVWADASTICTGDIKEMMYKTIQSRTGLLQISLGNKNTKVKTSENWFIISSTYNQIMLMWNNLLTDLMCHTSASGERCSEWIKKKYPREFLEIAKTMASDSVDYLRSYILESIINQITGLYPENICRSEGQLTTFDSLPHSDWSKLLQIYFSKQQRPQLIIPLVKIIDSHRTMIMDELLDDPEIEEYSLLHDIYNTEITLNLTTLSDIMKSMEKLHRENFEDVKKEYELTKGLKVFKTEFAYGMSKLTSMLYDSLAVAEIQMIKPAIEFLVKSGCHLHLEKEDLIILSGVLIGKMKYMKDLREELQIWAVQEHISEVKQIELESWFETNEIKTMKLNVSTRLPTKPDYVIYNDRRIPKIIWSYWNNQEVEEFQIKMINNWHYHNQDYRIIILNEESLQKMVGKNTYNLLSKQTPQFRSDWVRLFVLSHFGGVWVDFSGLFVKSIHNLVESTVQNEAGYCQISLNKKEEKNIVLESWLIICTENCKVIQDWFEETKEMTKFVDPSGHNALEWMTQTYGTEYQVAKEFILPNLRIYLRIYIIQIIVRLRAKDEPLIVHSDEAEVSMFHKLSANAWMNLWDYVATQPKGSIEVSIPFIKWIGIQRDIIMSHYRQHKGTIRPASLLGEEMEYPGVNYNVTSSAELSYPIRESQSTKETTNIIINKYSSCRTLLICVGSVGDILQFKTLYDIAESEQQTPVIITHRDHEKFFKNKRSHYINVDSEELMSLVNIVLNEVDLWTDIKANHLVRQISEEITGIAKNYEQIVDKVVVNSAVPNLTELSDILPCDWLEVSTFPDDVVFNPKKKTGLKGAILKAKEWMHFNIIRSEVDRSKVRSLWRTCSGCPWFYPQMRSRCGPLTIWSSPSTSNEIKLDEQDLLITFGSCDNTIATKDKIQLIENFINCGYRVTYHDKYKIAIPGSTLFNTMELYPGKFGIIEQYDFRCIKGGKFTLLTHGGHGTIMEALATNCKIIIHPIIADQFQICFVMEAQRMAVRLNDITNLNDCKQAITNLNRLMDTARIIKPIIPLLFTPLCVWFQMEQRQDDPENAICVFGEGDIKELETELPYGIYKLLDVEHQIVYNPQVLTRCVTNSFESMLTKHGQEKYLTCNTIAAMKLQQHSVTEQELIDGILSMGLNITIIYSNGTALVIKPYKRTTVYFYIDKTKTPWHVSAAKLLRHGDQIQLLNPDTCIKDLPHSIEYEINELHKVYSCATLCIPKLMAQQFGKSFFKNFLARIRSTNLQVLSSRSDLHVTYISIKQHFDAWVGDTIYPDTPLGVGWVITAQGWVLVNYFVKDGIIVVFSDDGIFEQTVLINLHLQYPVKRSKPVVLSTKQELVSLNKPTIMYTTLNHCVPRSSNLVSNFHKQNTLIVADFDNRKHHMFDEMDMIKRAAKVIFHTNKQIKVEDLATSHNAPLNRMIIRQGKVLYEHEFEQNEAKTNSQIIRNYVVSEQQCITNSPLTEEQINYIHRYFIQSDNKLIAIDNENYNDKEVKPNDWVVTLIQNSEVMSQDVIQNLTKLVKEHSMWHIHDQHNYELTSTQAGDVVTLEHGDLWVKSYGIVLVYVRVGGQRERLSWKLDTSHQQTSNPKPGDWWGLEKKAQTKVSSSFKNVLAINELKYHEPETLLVDGSDAVESDDLLDMYIPPYHYGYTGSVIEPLLDFPDNIAMQLWEDTDQTDWLSLYAPSNQCQLKSRELPGKIIQTEKITLTKWPIRSRAVLTKVCFEEGRSILGRMKSVAFIRTTTPNPYKLVMDMADTYFIKGWVSKVNEFRAKRLVILPEDVKRWVETNKDAKRIEPELLELLSGEILVKPMNDVNIHLKLESLLKDNTTIMTKQQQARIIVWQRKAVCAIYSNLFVKVKDRLKSILHDKIIYADGLRPDEISARVRLCKDIAGFFENDLTKQDRQTDAPIITTEMYMYDLLGVHPNVIASWREMHEVWRFKSNHYWGQGQGMRLTGQATTAIGNCITNLQVHQEFVKKNFSILELALFLGDDMCMVFREKPDTKNLRKNIATKFNMQSKDAWYRNGATFCSMVMSRTPTGAELCPDVVRLKFRYEVTNGVHEANAENILMRKASYIMMLGEGPNVKETVTRLNLPIKPLIWYDFESMLRAVGDKYDMTHVQVLDVYYNLLQMINSEKLYRHTFRHFSNIEAK

SEQ ID NO: 1281 - protein, 5247 aa, Lily alphaendornavirus
MSETDKELVITRQNVSKLPLSKKLYNKMIKRKYRSEGCTYVKPVSINKPDQIRKLSTNLYVVKSHTGEAKIPIMPAVGFGEFYEILDNGIPWDNLNPWGVSMLAASISMGGRILCEQEISQDQCSNTLLESEYAMQSLINEEYKRWPNIYQINGKLQLKRKIKLKPDTYGLTKLRDLIGMSPDFCWIPDDQVVGDKFKDVTVMVAEEIVRNWSYPNDFAKTLATGVYTQYVVLNSPGCSKKDLVTRHNTFTGLFICPECGIVNSSYDPEVLMCGRCLKQGLQIKIDVSQVEYLDLALTEPSAYEYDYSINSQLTRLLTQNYTDGISMNLPESEEAQQKLDVLNYVKAKSRLDIKTQYVCSNLTSEELSYLKREFKTLEITPRTTWNDLYGLMQSECHCLATTVIQRNQEDNISIKGFSPSYVNSCRSSVTFVKPDVNTHWTEMGAIGGSDCDIYNFNSLPELETLIKLADVKSRYLIVPNIHDQHNGFTKNYSYEISKESGLVKILANGTTVVLNYRIEMLNTLLKGDILRCGSKLYRLECIKKTNTVTLVKISRISGKQTPISSDNIKAVRTNVYKTFILSLPDWQQNVKGIQFGPLIKRRVRFNLPFLAHLKSRCESWPVSYHGLREYAIVSSFSRVEKDDRNYNIFDVDFEDIPDHVFAAYNLYLREQISSQTVSWLNQERPLGLEGILQGTAGGVAGIVKNLVIDRDGRSYLNTIIEKGSDTNWFLSSQWEDIKRTLEKWEAVPISIVDMSSPIDSGEISQQSERCVHGSLIDHFPGGCVCCGAIRESGQYCETCRSDTNCKHRCFHSCKGWKDHLCTNINVGKTVTLKDKLPCGHTVTQCSCCGVLSCLEKCMNCFDWNSYTDDLDQAVVNLLKRSKSQPTEQSYAKIVKKARKDYDYMSEEEQEQPKETSKHGGKPDSTPWGARVKYRKPSLRKAPVQAQKVNLPSEHDKAQGIFEEYQPILTHDKAEEEKDPYSADFMDENKSPKHTSDEDETLRENKSESIVDEEQIEKENANVNEMLARAYCLSLTDETYTGLVVDPSATRYQDPNSDFFNINYCYTGDVIIDPDSIQSVAGIDYSYTPGFCLKDTLAYFNPGITEERWEEACLTIGSPLSWCDYNDIPRFADYFEMNIIYVHIINNSIIQVRCFCSDPTALFSCIKFSTGEIDVENYNLLGHFEPALIKFRKEPIVPPVYLDTLTREDVDELFYNVTGDNMLSNYLQKSTLERLTFCNAANKITRMTDISAEVPELKFKARNNGFTVSNNSRGLNDAKCGHINTHIPGELAGMNFSLPRIYNRYDLEQWYMENLIKEEELDDENKVFRQRLLILISQYLELMQSAKEVESNKKNMNNAVAFTLKGIRPRKKKKVMYIENLSITEKVKNGDLVTIRAGPNLNTVQVGKDIKKLVLPNVMKPGLEFKVDLTFYKISYTSLIIEMSSIINRQVSLARVKELLKNAICLVGYPGTGKTRTLIEMWKSRKGMLVGVTRGSQNSLRYEAGSSKEAYIMSAEKCSINNANSEIVYIDEATLLTLPRLCTMLGPRVNKLVLSGDLLQIPAKEFSQICGFETTNCLEYAMRYSKEITKLKETWRFGARLCEAINEAFDTEMVSKKTTDTPMHLEHLDGLTKVGLERIIEERGIDTVLVFTGETEKRIRNLIGESTGVKITRVHSSQGNSYKRGLVVQDFRNGPYRNSEEIQFKSEYMMVAMTRCELEVTLLCTYKACNCRENTITNLAKHMNRQLGIPTLMIGGDKPQSDLIKKISLLAETFMNKLSSLEPNVILDWFENIKSLIISRKVHHFIKSIQGMIANNDEAALFNLLSDLSFPLLESVQIENGKAFAILDYNKTNWGFFKKKIMQTAYKRQEITIINGEVNIGGITLVSEQSWTTVEINPKGFQAWEQTKMSKVHFKIQGFKSIINLNNTHTINMNIRLINHAAQLAWHGVKRYLCIKFNGMVFSISPTVGCSLCGGIEIRNAKKELIVFINNTYDDTSTREIQYKDESNPITQYLIELWKPERDDDTFWELTQLISPDVNLNLLHCLMWVERIGTGIRGLFKGKSINPDEGHLFRNDLENNEIVHTRYVKRAQSKGIKIIGINDPSNAYMKNLSFLWLAKHGATEQLVYFSRHKDVKVIPINTSPENNLQLLKTLWTQELMRLPYNLSVLTANTDFEILGIKEILNSLELDIEEHKRRNTKLVPLIDQELVSLLANRGITCPDLYIPQELFDDAKTLGIQPHFNLSTDSTVSCGGMSYITDSYFCKMFSLNTARVRKAFHSRFINISLRQDIEQHVKMIRASGPLMNLITSECEEDCFNRIKTKVRTLKELAANKSNEDKSRPDPKSIEALEKMLTDKKLDSLVEPSSKNYEVDILGFGMSFIELTMNEIRKIAHDRNAGSNFVLFLPDFRKESVRCSFKKKGDHIVGVGESLDYVINKEWIHLINGLFEHQPHEVWQLPDSVKVIGSGDLYLTITSKTNTRTGPNAKVMERISNMIPVNYRNDEMIAKVPRMNSIKAIKETGELFNSCEVVLDKDTVSRLVRRAMTPGCTLNTLQTIARNRMQSSVITKGGRRGAGRTDLLRDINLCALVAQYIANNNENQITKYMEKIDTFLMDNKDWKRSTGALYHMLKLEMNTIIGQALDIKIPMRDLSNVLGDLISVSLGGNTGLKSSTKIMVMPQPHRIIFGEYYFSGSRYKVDTYITTGLEVIGNIIRNTFGQIFKRPTIRNYWRKPAQTNVKEKLDELIESGDIHDFEIRVYDLSGGIFNMIDKTMKKKFNMNKVPHTSVVIDRAEISYGNGITVKSKSTKDPAGSYKSIPLKCPQISKSSIVAVLTKEQEYFNPTAYSPIGKNCNLFSTHLASEIGALDELLENSEEFNEIVEIVTTVSDMGKKLNDRIVNHILRADRNVNGSESLTKIIKKAFDIIKTKPRPKNVTELKDIIWLQYQLLNHDDDKTYYEAAMNQNISYSESDEDEDREEKEQFQRKEGRGQDKHGEPTTRDSCDQDTGATLVSTEQTRSHLAPESKEFSNIPETAEDRTRQLIAKFKKFEIINDDIIKLANKYREVASAGHIKENMNYPALIKLRNACWLLHCELRKDNILEQLRIEMDYEKHLDDTDKLYEVDSDQINDPNNVYFSISKLSRVVDNEVSKSIMDWMDTKEYKSNTIIKPPGYTNERIIHPIPPSLYKQFVEMQDKLTVLMNEWEKISIDGNLSEQSKGESMHRLVTTMENCLTSIDKNNIKPDTVTVVIHSSMIKTLYNEMISKKKPKDKGKHGLLMGKKHDIVSEENIRNSMIREGLYKHTSELDTRIDESLNSMVYHIKLDSYINGKEDLGIKSGIIKTTTENVKFDLLLQDVISKVRNRTRSRFLIQTVDLLNTKEGTNLNKLLLEGYMDPETGDKPEAGKSAEDLKDTGGTGVTQHQAEPSVMHIEEIDEQEEVFHDSRTEHLVAESTEQLEEFPFDASASSTLSEEKAGEVTEEKPSEKETEKEKMIPMVSTPEEIVNSICSKIGDTEKLGVKKELYSILCKCVTDLGLSMGDLMSVKETSETTINIKTIANNYLNDVDPTLQTEEANKFDFQVRMKHIKSGNIHEIGKELNGIKILLVAYGSAGDTIPIQSVAEKLKHLGAWICLITHPDNIKVNRNCYNKIMYFDISQQESTGNATYDSVEENARAHLKFNYETATVVNKAVNNYNFDIALTSPIVPATTAITVSAGIVTCEIFCTACWEVGGTVSTSLLNIPENDYEIVKSIANYINTYTAPVLWPAMRQTLADRTLNLMGKKSAVVTNVLRALVSSEYIHSDKVLDDPLTIVLGYASSYQPTLAMRTDYKLRIGFFFGSMRIRDKVQEDLITLISSLIAWEVSMLVHIQDCKINHEYRTKLSAIQGVDVLEGLINQTDYLVMCDAVFTHGGAGTVQEILRCGAVPFIYPLFADQPYIAENIEQKGLGFYVRRMDTSILHKLKHVNRYKKRILELKWGQKKVTQNLIQMVVDMMNNVKSKSIEHLQQDDQSVITEERLVIRDQEIFSPVSIRFEPGIFSTRGPCSEETVIKISDSYTGEDCLKQAFLNALVSMEPERLARGTYILRYHNIKLASDLPTLTFISYYTYCNIQLLGKVNQTVIFDKTWPLISIFITRPRLESGRHVAHAFGTDHRMDLVRKKHTMDSSISVLDKVDKLYLLQRTNHAYRGSLSDMLDTILYKTGSDDTQTWDKYGGYLNACSRMKCQNLDSIIESNQRLVIPVIKATRMRDGVWYKMQTVMNINIGDLALVCTVKGDVCGIIAGQRGEDVYVYTGLTLDALPVLICLRLLRTASQRVLELNLRNTIREVPQLYVAFNSTTLNLINQECPGAHVATWRPGLEERCKVLCSHFDTRPHHSDRSKLERKYLLENLGTNKLKLIPKELPIAKVRLVKESQKAYFNYADGVIQLSLEFRDARECEIAKMFTKLLVKARFTTMNQRKCLRIPVDDDLEITALMTVIEILYNVDETDLILKRSTTELPGQTKEISRTYLEENFKLPDNAVVETVLSTLFKNKPTLTATVMEPTEHAHTITNTLKLGIQLDPGHRWLVILSPFTVYYMTELKGGGIEIGSSIALPDLIEELEDGTGHSNLEPGDMMMDQNPSQVAGPKFGKETFNTFSKWIRQNKWTDFKLASAKNISKAELTKKKMVWEEMYHYVDMDGANVEIGGGEGADYLPLQNEIEIESAGYTRTIMNEDETINELENYQVMDLWKQNRDIIDHVVAHCPKNDQRYTVKDGFFSIQEVLKTTFSEYPERCRPVFHTEAYASLNSLTGRLGRSAVIRNFKTRPSVSQTIQSMSYLFFRKDWKESVENFKAEPIVYNEKDFRNWIYGHKNAHKVITELESLSAEGPLVNPFNFFRSHVKLESINKENPIMDFRQAAPRAIVWLPYCMPALFSYMFKMASNRFKLILRKEVHYASGLDVNDIEQIVRNTDDSDVFFFDNDISKMDSQIDKDLIEVEWEVLSLMGISPDVLESYKTLKRNWRISNKYISVTGKWLRHSGEPTTALGNGIINLAITALSTTETRRQDLKLCLFMGDDMVMLTKKKEDVLQVKKKGKHLANSLLKPRISRTCSPFCSFIVGVDETTQTVAIVPNVVRLAYKWEVPNGQHETTEDAVFTRQLSYACVLGRNDFSKDIEKKISVKTGGELEVPTYYTTQTMIKLNCDLHNMEEMQMVQIISKLYSSLQKPKTYSYTFLITSENLRKGIRLRKESDTLNTTESRIHHRLDEENH

SEQ ID NO: 1282 - protein, 1414 aa, Nansha Islands sediment alphaendornavirus 2
CYMKGIRQYILPGIWPDMENWIYAIRDKGLLAGCLHSEELHSLEEIMKQNPISYDGEIPKVNREKYLDLTKVCTTASIQRAVSTRKNYVLIPYGTSGDLGIFVNLQRELLRRGHKAVLLTDPQQSESEQTLLNNVAGGNWAGIINSISDYCSSIKEKLDLSNVSSVVISPNLNELITHIVSHNIKVICMSPNGYSAGVDHEISSAMKNMLHGWNSEIDCHKVALCDKEFVLNGYESLGFDDSQCIPITGAKNHLLLYLRPNKFDKLRETSVELAKKLNLALEVYEAGKDKRSLHELIANADSIIHHGGSGMVHLSLYYGKPQLIYDDKIDRMHNLENLYRLVGDCKFSSVNLENIIAIKSQENLDIKVQGDGITNVSNFIESVTSRNCWLQSNQLMDWPEHKLSLEDQYITNCLSVSKVYDPPESRGCVGSCIIAFSKSQKGHSARSKLLNKIKEDDYHVHEIKTLLVAIGLNYAIKIGPVVHVQTCDGSRPTIHLEIESKGRLNHCKLVELEYDENDTDRYCASNNQVKNINSIDLVDYLTTDQLEVFDNAANKKLNWVERIGRKKKIHIEQPFYDESSATITAKLRRPEVAALFIAGSGYLCILNPLTPGTAEIITGSGQIKDGYALMVLLTNSMSDNIDAKQTDVVSWNNETATALTSENQRFDRISNTILGSNTVRILCWDTMKHDKHDITDILKHRANVVDYQNIELIERQLSNKHVFFTRTMDGDYMTIPVTTGQMCEYTHNNVDVKLFQTCIEIHGSLDELFAIADLLEPYCKIEKERRKIKYMFASINSGLLDVACTTTFIEDAAYKPNNELAYFGLRPNRSGGDNTVETTWHEPTMSTNDGKHMPHIWMGVKQDTLDTKVELTGNPEDIVIDMAHTLQDTQHREKPTIETGDPCVQDVSMDMKIIKMESVDMIDDRVTDEIGEYWDNEDVVDNQILFSRKDGGNLKSRAMAGNQVIFNKTTMTKYPVRSREVLTKQFGAEHNAVSVRLGGKEELQRIKTDPKTTIKDLCNACFTNDWRDRVVAMSKQPINIQKEEVVKWLQGRPGATNIARECDKILEEGFDLHGLNEVKVFNKLESLLKSSPVTDRRDGKVRIIVWQKKGICALFSSVFMEAKDRFKSLLRENIIYTDGLTPLNINKRFGGVSNANWFLENDLSQQDRQTTHELIDAEFVLYRLMGVNPNLLAMWRKIHNHWRAQGQHVSGLFDGMRLTGQATTALGNAIVNLICHTELIQSNKSKMVMYLLLGDDMIMATKTKPNCKDLATNIRVKRNMISKPHLSNKVGTFCSMLVYKNDEGHVEVGPDFWRLADRFDVTNGVSDATDKNITARSQSYLFMLGRNDMTERVNREKHWNLDLPDYYNLSAAVSACAHKYSVTEFDVLARINSLIKSIEKPMPNTISVLAQAYE

SEQ ID NO: 1283 - protein, 4627 aa, Oryza rufipogon alphaendornavirus
MSVMTISKLCNVNAATTGGGRRRPPPFKNKNDQIKYKLDLIKPKTPNTIGFLKRMDDIKRPNMGTTALDPLFGWFRLPRNVNCRMNKNKFITDFDNLFEHYKGKKFHTCKEVSVVCVEAMRGELQLKERHYGIAQSFSPQDERLSKFCVKNMSFGLITRLLYLIYVKGAEIYIDPTVNVDNLLKTMSHVIKKKDNSMEEEFEEEEDFEEMDLDDMGYLDDNIKEKGEYFEIVPFGKGNCTEKLLKAIKFQMKLFKGLFNYMYHHIINFKDVNEGFVEIKGTRDEEDNSMNYESSSGKLPPIKFCPLCSCPNAYTQIPRRMKTCHYSVKKYYPNNKTIDDKFETKVKDGEVMKEIPWRCGVCYTDLNLEIEEFRQANVIIDIIITESLYVLMGDLENLMKLGYTDTYDDLKNTDKENIRQHDKILVNEYFFHLQKRIVTVGQDLDPIINENVKKITKGVNFRYDSKFNSVKPEFVCELSVCREEIKSHLRSDAIACIGDLLPRTDDIKFHQWKYNDWLFEPNNFDGCCDVDCCNHNEKFVCFLGMGALTLSLPQILGIVNKQRQLYAVVPRFKDNKCLRDNTGTVITEGDNTMLFLDGCTNPLLMKTDTIETLCQFNTIVNKGVYYIINKVFDLELCSTICILGPYTDVNALPDEKIIKDDNIITTITLPHIDSLMGRIISVNFRPCTFNPHTSIFKYLCLRHLSGQVSHNTLKPYAVGFALRPIVVHNKVVSHPSVMFEMIDIPVLLSRICMMQLKMEYDLSIKYSDKTKYLGPLRWMPKEFEGLTTRYVINVIVEYLTDKFSVTEGDIMKVFESTHLAAFITKLHDNHLWTALLKLSKGITTERLNVRNLGDTDCEALSNNIHRCFHHNQDCIHDLHSTELVCKCCGVSIELGLLCKCCRGTTPITAFQIDQQIRKEVDDENEVYKHRFQELETKAKEIRSKIDHNELQWPALRPKPRTVKFQPASKPRIAKSLTSQAPTDKLQPTKNIEEIIEKKDKTLTTISNLSEFKALLDDNTRKIQIVDDYDTDANQEGVQVVHTEKGKQDVRTEEIKKEEQTVTTKTDDLQRETTDITIKKGAEDLDLAGEGWRQMFSKFAKNIVPSVRKRITRLSNDAHELLLADNKEKALTRLKYDFYSHVTDPVEFEAKLNDKHSTMYTMPHIAVGFVAWQQDEFEVVETISLPNSSFNSCGYEAFNYSLDKPIPWADFVSITGTDKNWSDLALMDLAADLGINIIMVEPRGTFVSKSNPDCDDFMCIHYDLPLPDESEKLIDTVSNRIGHFSPCIIRRIRRGGTYYVHDLNQNINDRNKIIQTRLGPHNNCNRAPDITGDENILCELIFNLHISEDLSDSISRFPTVYELDGKMYISNNPDTKLLKWETNLIHVEIRNEYHNLVDKIASALEGSLKLSELPEMRHKSSELPNEMESEIAEEIMEVLRTFSRINSMFNDKLNAALIKDSKDCRVIPWYGRSKIIFEKKFNHKLKKFDTLCLKQGKELYKCEVTNFSEGDPVVNLELYSEQRFKVMILKESSGSAIKSLVSLMADHVTMTEFKEILKRSSLTLGPAGYGKSTMISQEITSGDLCVAMTRSSVMSIEEKIKDKHVTVCSLEKASCSMMKCANTIFVDEATMVDWLRLALLCERPTTLKLYGSESQVGAVDMSPTPGMRHVMRIQDLLLDHQVNRFNTTTNRIGEELATFIRPMELKLVSLAKHKTTYNVTVLEDADFERLPIMVNRCNPDVIITPYNYNRQRIEAMHGISVPVVTTHSYQGQEVNKSLVILRADRTGKWDLNGNELYLNSALTRAKYHCEIIIYGYPISNIQTVSDLCHYVGGVQPDNTINEELEPENDDPEQDMNDELPTVLTIRTMHTLRKSDIDKLNELSITQQGHSVSYFYVQKNHISCVLKFMGKTVAEIVNIDGNVTITGPWYYKRKIMDKLDQKLDLNDISGITICPKGTKLVKIRTNQRFRNKVRELAWIVDKCHDGKLIIKINDVTITVTKHVGCPLFSGLKFRTENEYFEICQLKYFSLRRELVIHRSKNYRELSCIMKWLDIDFNSINYDDEVEIGWLTSLSGHNISSWRQYKERLSSVSMWFINACFDSTSVKCKELSDRNTTIFNRYMLTEKRDLIKFHQSPIKHDKLIYKTIERRALNLWKTENVYELFNKENLILTVKDSSDEILWRQFVRECLLDMDRSDLIKGTSGLNLEIPGLYLPLEKHYQLGTELRQIVGTNINKLLLLTSPGIHDSIRLNINDNDEFKTSILARYPKLTIQVGNYNLLNTGMVGVLEQIMLNTYAKTSKNNPQIVVYGGMSPSCVAVQGKYYVSLDIPDNNSSTKRYYDREMPIVNALVYRFNEGRDDEHKVSLNYDGSYARRYLLGVSLNHVTEEYIQQKLNNCDYLYGWSYRIDNQSSWYSLSTRGDKIYYHGEEYSNQIKNQLAIKIGNGTPLWVDYDKQEYVETTIVNELFGMYLVRFTKRKFPNSYKVTRVAFTEQGYNSTTNIEVPWINTQIVDIMRTRTFLTTKKLTINNNLLRNLLLRLITGDDSEDSLLAYARTVQSTQVITERSIQDLSTVDLHITMSTTWFALYVHHNYLYKLEHIISLINLGEDKEILFTLLQQIVPGIMKWVGIIAENTSEFIETCMKYLQFDRSFLTNLREVSEKIKNTNWAVQGSRGKIWNFSFKKLIDNDIATLDNGAPPDNDGDDKVDQSKSEDHVSDNESFTTCDSTNSELEHIDVSSESDTTEHHDTGNINDEPVIVNALAMPDTKNQNLNNKMDVDVKQNTTNLTSSEQTISQIENKNAVSTVDKDVLVPFKEIIKPITNLPTPTCIKGVCGEVPLIIWSYWQGSEINHFLTTCIRSWQEYNPEMRIVILTDANLGNMHNILNFDDMKQMSHQAKSDWLRCYCLANYGGIWLNLSSICAGSLTPLITATTNHESGLFQLGIPGGVNKMKYEMGVMISTTKNKILHEWFKLVNEFVILSNGDTTVMLDLIKDRFKTVAHTSILAVGDYGKFYLWVYVLQRIVLDFLKTEPCHINAENQKCLLYMGKYAIEPTKTWITLSTKSWQDLGITVPVVNLISSMRKNVIDNYSDKFEKGSVIAMLNNCGHLKYNPLSLSHLIPKELKITESKPSSHRMKKHNVDYILIAYGSFGDFIPILNIYKYLTGRGSNYVFMIHQDFANYINNDDFYDLRINTKETFKLAMDLSDKGWSSCLSGSINQLKEMMIAMNDMVYMYKNTQCTIVTTHSFYLYKNYSQVFGKEWIVLETFPLQMMSPVDRSRSWVEQFIGKFYDIDMPLPIPIGQGIPKNQRPVISMTNCLPWMVSNYKIKNPIGPLNLLSGYQKPLNIKIPMNSIFINFGSCTNQNDVEYMYKLAKDICTLGYDTILYDKLHESRVSNDILQIVNECPGRIILLKHFNCIEMQGKVFLTICHGGHGTVMDSLYSEMYIVIQPKIFDQFHWVKILEQFGIGCALKKDYNKEDLSSVITLAKANHNKLKDVKANVSINNVDLIRQLNPRKDLHGRIYPNALKQAGLIQSIEFINDRFSENLPIGYHILNDIVDVELFNPPTQSHCVRECINYAFSTNTKDAILACSSLSVSNLFKPGVTESELEDGLLSIGVNYCLVKRKNGRLMNARPGPVLCLKIGDGGISQHCILIKIINYGKSMSLSGTPAVISIKDNELENHITMRLANNTSLELCNPHIMMSQLPNKWIKNFMARTRSLSLHSLSTRQQLHVTITSMCKSGITYIGDTHHGDKSLGVGYCSCKEGWQLVNFEIFMNKLIVYTDIPCENPGVIINLHLDYPEERLHRTIVKDHERWVSLNKPTVNFNEINKPLIRSNELVSPHLSKFNLIVADFDNRTHHNGDDIGYLKRANKLIIYSEPAITLNDLLTTHNKPYNRLIIKMGHVKYCHEFNWSNSARLFLSLTNGIFEGNSIITDNRLSDDIKTYLIQYYKIIGLKVHAKLSVYENRPVIIAVSDLIGTLNQIPDVEPELISQLTELLKKEDTVKLTWLTHNNCKLKQRDCIIQISEDMISIPCCEMIIIKSLKGGADAENRIGWKLDSSNYSFKNEDKWNIKPALERKNIQSSCKDVIAMNTMVINNVAVSPVIRHITHYQNYEPSLDIYIAPYTMNYTASTIEPLYDMPDIASMQLWSDTDLTDWLNMYAPSNKTTIKSRELPGKIINMEKITMTKYPIKSRPVLTKICFEEGGSITGRLFSVVNLRTVTPDPEKILWDVCNAYFQPGWEHNIPHFKNDLLIITPEDVKNWVEENKDCFGVEKELNDLLAGELLIKPINDVNVHLKLESLLKEKHISLMKEQQARIIVWQRKAVCGLFAKLFVRCKERLKTLLLDHILYVDGLRPDEISAKLRQISNVFGFFENDLTKQDRQTDKPILEVEMLMYLMLGVHPNIIASWRASHEDWRFKSTNYWGKSTAMRLTGQATTALGNCITNMQVHSKFVIKNKYWLKFALFLGDDMCMGFSHKPNTQHLRQDIACKFNMQSKDSWVLNGATFCSMVVYKTNDDVVEIGPDVVRMKFRFEVTNGVHEATKENLLMRKASYLMMLGKTPEVDQLVKELQLPITPIHWYNYHMMLQGVADKWGMNVQQVEGYYHNLLHMISRENIYIHSFRGFGNR

SEQ ID NO: 1284 - protein, 4572 aa, Oryza sativa alphaendornavirus
MDDIQRPNLGTTALDPLFGWFRLPRNVHCRMNKNKFIDNFDNLFEHYKGKQFHNCKEISIVCVEAMRGELQLKERHYGIAQSFSPDDERLSKFSVKNMSFGLVTRLLYLIYVKGAEIYLNPTVNVDDVLKNMSHLIKKKPEIIEEDFEEEEDFEEMDLDDMGFIDDKIEEKGEYFQIVPFGKGNCTEKFLKTLKFHMKIFKGLFNYMYHHITNFKEVNDGFVEIKGTRDEDDNSMNYESSSGKLPPIKFCPLCSCPNAYTQIPRRMKTCHYSVKRYYPNNKTIDDKFETKVKDGEIMKEIPWRCGVCYTDLNLEIEEFRQANIIIDVIITESLYVLMGDLENLMKLGYTDTYDDLKNTDKENIRQHDKILVNEYFFHLQKRIVTVGQDLDPIINDNVKKVIKGVNFRHDSKFNSVKPEFVCEMSVCREEIKSHLRSDAIACIGDLLPRTDDNKFHQWKYNDWLFEPNNFDGCCNNNCCDHNEKFTCFLGMGALALSLSQILGIVNKQRQLYAIIPRVKDNKRLRDNTGTIISEGDDTMIFLDGCTNPLLVKTDTLETLSNFNTIVNNGEYYVINKVFDLELCSTVCILGPYTDANSLPDDKIVKDDNITTISLPDLDSIMGRIIGLNFRPSSFTLHTSLFKYLCLRNLSGKVSHNTLRQYAVGFALRRFVVHNKVVSNPSVMYEMIDIHVMLSRICMMQLKMEYDLSLNYSEKTKYLGPLRWMPKELEGLTTRYVINALIEYITDRFSITEIDIMRVLESTHLSAFITKLHDNHLWSALLKLSKGITTERLTVRNLGDSHCEIISNNIERCFHHNQNCVHGLLLTEHICKCCGISIEFGLLCKCCKGTTPITAFQIDEQIRKEVDDEGENYNYRFKELESKRHTIKSKISHNEMKWPPIKPKPRTVKYQQITVARPVKQDVTEMPTNKALPTKTIDEVIAKRGKHVVSVSNLDEFKLLLDEDMKKIQIIDDVDSGANKEEALIVHTIDNIKDTKIIKLTDESQVTSKQSDRLQTDIAETPPTEGDNSPDLSGESWRQMFSKFASKIVPSVRKRITKLSNEAHDLLSADNKEKVLTRLKYDFYSHVTDPVEFESRLNGEHSTMYIMPHIPVGFVAWQQDEFEVIEKISLSNSSFNSCGYEAFNYALDKPIPWTDFVSITGTDKNWSDLALMDLASDLGINIIMVEPRGVFVGKYNPECDEFMCIHYDLPLPDENEKLIDTVQNRIGHFSPCVIRRIRRGGTYYVHDLNQSITDRNKIIQSRLGPHNHCNRAPDITGDENILCELIFNLHISEDLSDSISKFPTVFEIDGKMCISNNPDTKLLKWETNLIHIEIPKEYSTLVDKIASALEGSLKISELPEMRHTSSELPNELESEITEEIIEVLRIFSRINSMFNDKLDAKLIKDTKECRVIPWYGRSKIMFDKKFNHKLKKFDTLCLKQGKQLYKCEVTNFSEGDPVINLELYSEQRFKVIILKESSGSAIKSLVSLMTEHITMSEFKEVLKRSNLTLGPAGYGKSTMISKAITHGDLCVAMTRSSVMSIEEKTKDKHITVCSLEKASSSMMKCPNTIFVDEATMIDWLKLALLCEPTTTLRMYGSESQVGAVDMSPTPGLRHITRIQDLLLENQISRFYSTYRIGESLATFIRPIEPKLVSLADHKTTYNVTVLEDAEFEKLPVIVHRCKPDVIITPYNYNRQRIENMTDVTIPVVTTHSYQGQEVNKSLVILRADRTGKWDLNGNALYLNSALTRAKHHCEIIVYGYPISNIQTVSDLCQYMGGAPHENSLEENTDIVKDNPEDDMVNDELPTVLTIRTMHTLRKQDIDKLNELSIVQQGHSVSYFYIHKNHISCNLKFMGKSVAEIININGNVTVNGNWYYKRKILDKLDEKLDLNDVKGITICPRGTKLVRIKTNQKFRNKVRELAWIVDKCYDGKFTIKINNIIITITKNAGCPLFSGLKFRTKNEYFEICKLKYFSLRRELIIHKSNNYRELSCILKWLDIDYNSINYDDEVDIGWLKTMTGHNISSWRQYKERLSSVSLWFINACFDSTSRKCKELSDRNTAIYNRYMLTENRELIKFHQSPIRHDKLIYKTTERRALNLWRTENVYELFNKDDLILTVKEGSDETLWRQFVRECLLDMDRSDLIKGTSGLALDIPGLYLPLEKHYQLGTEIKQIIGTNINKLLLLTSPGIHDSIRLNINDNDEFRTAILARYPKLTIQIGNYNLLNSGMIGVLEQIMLNTYAKTSKHNPQIVVYGGMSPSSVAVQGKYYVSLDIPDERSPIKRFYDREMPIVNALVHRFNEGRDDQHKVSLNYDGLFSRRYLLGVSLNHVTEDYIQQKLNNCDYLYGWSYRVDNQSKWYSISNRGDKIYYHGEEYSNQIRNQLAIKIQNGNPLWVDYDKCEYVETTIVNELFGMYLVKFTKRKFPNSNKVTRVTFTEQGYNSTTDVEVPWINTQIMDIMRTRTFITTKKLTINNNLLRNLLLRLMTGDDSEDSLLAYARTVQSTQVITDKGIQDLSTVDLHVTMSTTWFALYVHHNYLYKFEHIISLINLGEDREVLFTLLQQFVPGILKWVGIVAENITDYMEVCMKYLQFDRSFLTNLKNVTEKIKNTNWAIQENKGKVWNFSFKHPDDNNMPMLDNDILPDKDIDRYKNSIREEDSTCDQGPVTTHEESDLENTQEKSETDKELGDNSEALGLDDEVDGDNQQSSSENVVYNVEKDMTKETDATEKPASNDDHKSVPTSDTEIKLPSDDGTQISFTELTKPITTLPTPICVQGAFGEVPLIIWSYWQGSEISPFLLNCIRSWQKYNPEVRIVILTDNNLGNIHSIFDSSDTKQMSPQAKSDWLRCYCLSNYGGIWLNLSSICAESLMPLIKAAVNHESGLFQLGMPGGVDKMKYEMGVMICTTRNKILHEWFRLTNEFVILSGGDTTIMLDLIKDRFKTNAHTAILAVGDYGKFYLWVYVLQRIVLDFLKIEPCHINVENQKCLLYMGKYAIDSARTWHILSTRSWQDLQITVPVINLISAMRKNVIDNYSNKFEKGSVMEMLDTCEPLKYNPLSLANLTPKELKRIDLEETDNRQKKNKIDYILISYGSFGDFVPILNIYKYLIGRGSSCVLVTHKEFASFINKDDFFDLKIDTKETFKLAMNFSEKGWSSCLSGSLNQLKEMVSSMNELVNMYKNFNCTIVTTHSFYLYKNYSQIFGKEWIVLETFPLEMMSPLNKTSGWIQQFIGKFYNLDMPLPILIGQGIVRKQRPIISMTNCLPWMVSNYKIKNPVGPLNMLSGFQQPLGIKIPNNSVFINFGSCTNQNDVEYMYELAKDICSLGYDTILYDKLHESRVSNRILQIVEECSGKIILLKHFNCSEMYGKVFLTVCHGGHGTVLDSLFNEMFTVVQPKIFDQFHWATILEQFGIGCSLNRNYTKEDLTSIMALAKASNHRLKDTKASMNINNLGLIKQLNPRKDLHGRIYPNALRQAGLIQNIEFIEGRFSTNLPLGYYVIDDIVDVELMNPPTQSHCVRECIKYAFNSLTMDAITSCSSLSISNLFKPGVTESELEDGLLSLGVNYCLVKRKQGRVMNSKPGPILSLKIGDGGISQHCVLIKISSYGKTVSLSGSPAVMPIKDNELKDHISNRLTNNTSMELCNPHVMMSLLPNKWVKNFISRTRSIRKHSLSARQQLHVTIASMCRSGIAYIGDTHHNDKALGIGYCSCKDGWQLVNFEIFMSKLIIYTDIPCENPVVIINLHLEYPKSISRRTIIDDKERWVSLNKPTVNFNEINKPLIRSNEIVSPHLNKFNLIVADFDNRTHHNSDDIGYLKRANKLVIYSTPEITFNDILASHNKPYNRLIIKMGNTKYCHEFNWGNSARLFLSLTNGILEGNSIVTDVRLSNDVMNYIFKYYKIVGLKVHTRVSIYEDRPVIISVSDLLDEFSRNEEMEPDLVTQLTTLLKEEDTVKLSWLTKTNCKLNDSNDVICISDDTLSIPCCEMIITKSVKGGANSDDRIGWKLEDKDQSFKSDDKWNVKPSLEKKNIQSSCKDVIALNDMKINDVQDSPSIKNVKYYSNYEPSLDIYIAPYTMNYTTSVIEPLFDMPDITSMQLWTDTDLTDWLNMYAPSNKTVIKSRELPGKIINMEKITMTKYPIKSRPVLTKICFEEGRSITGRLFSVVNLRTVTPDPEKILWDVCNAYFKPGWEHNIPHFKNDLLIITPEDVKNWIEENKDCFGVEKELNDLLAGELLIKPLNDVNVHLKLESLLKDKHISIMKEQQARIIVWQRKAVCSLFAKLFVRCKDRLKTLLVDHILYVDGLRPDEISAKLRQISDVFGFFENDLTKQDRQTDKPILEVEMLMYLMLGVHPNIISSWRSSHDDWRFKSTNYWGKSTAMRLTGQATTALGNCITNMQVHSKFVIKNKYWLKFALFLGDDMCMGFSHKPNTQHLRQDIACKFNMQSKDSWMTNGATFCSMVVYKTNDNVVELGPDVVRMKFRYEVTNGVHEATKENLMMRKASYLMMLGKTPEVDKLVNDLQLPINPVHWYNYHTMLQGVADKWDMNIQQVEGYYHNLIYMISKDDIYQHNFRGFGNR

SEQ ID NO: 1285 - protein, 4393 aa, Persea americana alphaendornavirus 1
MEKYKSRFTKNNELPMIPAIRGERYAKDLHYGLADSRPEGKLMDDKINLGELSPLDVARLYYNVLRLKRCIVNVSKFSIAELEALVKHEALNDDEMIFEEDFELEDLPVIQICKGKSKDTIPVLQMIKRVVMKYGGYRGYFTAMQQLETTDMPLLAVEDGSYEIKNRQFNPIKVCSLCDSICHYSQYERGLKTVHKSLQKYKPKSKVLEDEMRTVIDSKQHSVPWRCGLCFTDLNVRIIFSEERKTLAIEIIMKHLFVIAGNLDELLKLGYGDSYEDLTNDEKYSIKTNDHMVVNEYFYHLQRKIIPVGQDLEKVSEQAISAVINGCHFKALSKYNSIKPELIAEVSTLTQLCRQFMQGTEVVCIGDILPTITKKGYHQWYKDEHFYQLEGGTACANKLICSHAGPFKVFGSFGALKLTISQILNMVDKQRSMSIIMPIRAETNTLNDKTGKFVNDDCRTILHLDGDTVGYELRKDTYHLLSNFDIIYCNHNYYMVNTIKKLPLTQLVTVTGPYHDFNNISALRVRVIDRLTIKLPLPNIDGFMGRWFGLNFEEHEFDINVPLFKYLCLRNLSGKITHDTLRQYAVGFALRRFVVHNKVISNPSVVYESIDIHIILSRICMMQLSHQYNLCYNFSNIIKLLGPLRSLVTDIEMAMTSGLLSLLSEMINKTSGISIEQLTEWMANSNVSVFMNGICKHDFWAQLLRMSQVTEMESIRIVDIDRDVLADDLADITTCDHHTRACKHEEKKIMTRCACCNLKLCANVQYCECCKPKEADNFMKHSSWAETDQPVDFAISPETTIKAERALKLATRQIPESSRQEDIPTASTKDDTQRDEPTKTPIPVPTQAPKPYEASDGESWREVINRAVKLKVDKAKAMILPITDRVMQRLKEDEQAELVSKLGFEFVEHVINCADFERLVNDKDDTMYYMPHCAMGHSLLPRNTFEIVKRINIPNSGVNTCAIDAYNYTATKPVTRDECLAVVDKETALYQTDLLDLAMSREDNLIIVADSRCYVSRGDPNSDSYICIGFNEPQEARGIGHMMPIVIKRLEKNNQYFLHMQPGNITDRNMILATRYNQHTKVHTATEVDEFGNLVCELIYNYTVTETKSSNLAQSVKVQTLGDDVVLSNNSLTKIHDPDKDHIHVTIPRWMRRWTDKLQACLTGSCPLSALPDFRHTTSELPLNIEEAVEDRLLECMRSLCRINEACTTLQSKTIKRKINCTLIPWFKYSKLLIPNTMKTSLKKLDMCAVVVDNIMTKATVIGTDKTNLIVDIPIIVDKSVIVYEIKESSGSQIRMLCGLCQPTIDMPTVREKLRNAEVVLGPAGFGKSTMIGNQAKAGDLCVAMTSTSVRSLQAKVTASARVMSIEKANYTHQKTKTNLFVDEALMVDWLSIILLCTKDTKIKMFGAEHQIGLLDMSLTPGIRTIEPIIKHVSDNNIKRSKISYRIGEPLRTFIEPLEPGIVSGGTHKTTYTVTCLNDEQIENIGQAITRSRPDVIITPYQYNKAKIMSIDNRVPVETTHSFQGQEVMRSMVVLRSDVTGKWDLNGKPDYLNSALTRAKEHVDILIYGYPLLNVTRITDIMTVISGMQLLDVSTAYKPEETKQITIDEAKEIPENITLSNMHTLTENNIDTLNKLKPEMKGVRIHYKKINSGVEITANKFGLSVAKITNIDGNVTIDANEFVKRQIQSNLHTALIVPDEELGSLTGGMNKRILRLNIRTASKLRELNWVLDKTIDGTLQIKIDGGILIITKTTDCPLCAGIKAVYKNEKLIITNGWKDILTRDMYITYDGQLSVLSGIINWLEITTTDIPMDVGYSIEHLRDLRGDIMHSKWQLEERLTQVSKWILNAILMDEFPKCNTNNLANVNLYNSIASNLGATKVTHHNSVIPHKRLIIKKRSLLQSDQYVLADNKRPIAEVRPGNQVETWRVFIIACLADMKQDQQIKGIGMADIDIPGLLLPLSKHFAIGTEIKSLVAREINNINRLAATNSHDAIRLTTECYNAYRNEIMTRFPKLNINHGNYEMVQSHIEQILENIIVNMVSRIDKDAGELVVYSGPVPLVISMQGKYYVKIKIPKDNDPELMYHDQQMIMVKSMLSLFNSSRTGNKVDIVWNGQAECNRIICGVSLLSRTNEELKELVDEFTNVYGWVPIEEKSNYFTINHKDRVIGYRHGTFTRQIRNNLIERVADGRPLFTNPTTAHYVQCRTILEFMDHRLVRMEYVKIPESKVVTRCIGTHQDIFSEETVRVPWLNFDIPSVLTDKKMIIIKDLKIRRSLMRNLMLRLLTGDDSSESLIAYARTVESTQLITDRGIRDANTSDLVVTLNTAWYAYYIHNNYNAKFKMLISLINSAQAKPTLMRVLECIVPGLMNIAGKANQLVEGYCEKLITYLNSNINIVNQMKDVLSEAKRMNWSNDYDDRRLIKYYFDDEGGVGGWLDYRPPPSFGKEDDSGNREESTDSESNKGTDDEFFDANADDDHDEEPHVAEQQEPKEVSTEAAAVEPTQQEELPVDEPSVGARDSDVVSRLMDQDRFAGLSRDVINDTIQELAQTLGQEADNIGQEKIEYYLAAKWDRSMVQVRLTRPQFSLNRGSEPSPPVIEVTTRHTVPKLIWTYWNSMSVDYLIWCMINTWQHHNPDYRIVVLTPDSLRHVLSKSECEILAAQTPQFASDWTRLRILKEFGGIWLDISTIVTDSLDGIVTRCSKSRSGLYQICLNNRQAVNKVYESWLIVASSNNRLVDEWYNVTTQMMNYSKPNGDGALEWLCNKYGEVFKRAEQPIVPNLRKYLRLYITERIACSNTSLEPITTCNDEAKLTLWHDASLLQWTDMWGVYATTDAEANEIEIEIVKMIGKVRDIILNEYNKGRPYTDASYIGRMMSIMKTPGNETGVIKYNILYCDKLPIYKQGQARIPPTVMPAKYHSARVMIICIGSLGDITPMLAMRTMCEAREVSTVIVTHCDLIENLAIDRAHGLRCTSKELMDTAMRLYNDSSLDDKLSGVDIMNRIVEETKQIIHNYSSDDMNVIINAPFPMKSAISKVLKGNWLVANPFPPNWYREPLGNDSDYTLTTKFVLKASEELYETMDVTKLDCKSVKSVLLTYQWMAEETSNTSIGPLTINNACGNVTIPMTYKKIMISFGSCKDSIVWSDLASLIKNCVLTGHKVIVTCSAEGYLNNYKFRKVCTDLVGNLSIIENYSHNDLQNVDYMITHGGHGTILDCIYNNVVPIIYPLFADQYAWANRLSGMNMAIRLRSLTDTSDLREALSRGELVRKTCEKCSRMMNINLDDFIKWLKTSGLWLEDVRSLEYTGVLDNKKIFHRSKFNDRIGIYSIKKMIYRVLHDPETPSHCVKSCIVKWLGNENSVRFNLCSIPPVMKLQQEGVDYDTLIDGILSLGINCAIIDDNNTGTLVKLDNGPTIELLIDRSDLTWHCKLVEVLEYSVSKNMAVKCRPAVVSTTNMGPSIEKLKQEYTLLELADPMIMVMKHGKKFANNVRERLKSTNLTVLAPRSDIYIKLLSGVQNSIFYVCEVIMPDKPLSIGMITTETGWMTVNYLVEDNKLIVMGAGTFYETSVLVNMHLRYPSTTPTRIVSKPQQMYALNKQTSTITLTRRLIPRASEIMLVPQKEYTVIVAEFDNRSHHMHDELSVIQNATKVVVHDGRNGRIEDYITQYDAAINRPVIKMASRLYVTEFQDIAIQMRIEEMFNYKSMSRVNLSLKHLIEPKIVEYMTKVLRIKKNKVTLRQGMEILTNQMGSNELQTKITNSGLSNEDKLIVSMWLRQNPKLMVSHITAPIQNWDGRDTMISKTGNLIIHPMLTELISSQVAGTERLSWKVGTDRSVPGDWWALRNKMQGKTVEKVNDVMAINYLNIHEQESVTHHAEEVDYTEMIDLYIPPYQVIYTGSKLEPLYDFPDVTSMQLWDDTDQTDWLNIYAPMNECKIFTRELPGKIIEVEKATMTRWPIKSRAVITKVCFEEGRSIIGRLKSVMLVRTKTINPISFLEDFCDTYFNPNWRSQAAMYQENNLIIEESDVRAWIEDSKDSNKIVKELKELLAGEMLIKPMNDVNVHLKLESLLKANPINVTKEQQARVIVWQRKCVCALYARLFLKIKSRLKEILHEKIVYADGLTPDDISARVRLCNNVNGFFENDLTKQDRQTDRDIINMEMLVYIVLGANPSIISSWREMHEVWRFKSANYWGEGKEMRLSGQATTALGNVITNLQVHCKFVKKNSISMQLGLFLGDDMCMLFSEKPSIKNLRNDIACEFNMQSKDEWSYNGATFCSMILAKTSDTTAEVAADVVRLKFRYEVTNGAHEMNKENVAMRNQSYLMMIGDMPKTRDIIMKHGYVIKPVQWYGYDTMLAAVAEKYNMTHIQVEGYLHNLLEMIDKSRVYSHKFRVFSNKP

SEQ ID NO: 1286 - protein, 1179 aa, Phaseolus leptostachyus alphaendornavirus
HRIIVTTRDEQVFKANKVDGIYQLKGFSSNKALELFNSLYCQVNIQVAGKMNTTVVFDSSWPTRSLFITEPIKVGNSREAHCYPMQTRTDLARVKQTIDSNIEVQKKTDYESICSNLELRIGISPEDVIERIVTMNRGNTEWGWECYGGFANYEARMSNLNIDSLIQSDPKLIVTVTQALKGNKYIQYELHHGRNIRVGEICFVFTTNGIIPGLVVRSDSSRLIVRVSSDADPLPVLLLARLLRTAQKGRRETLKRVEEMLKHSKEAMVCLNKETRSYIESMNPGSNVRMATSQELKEGEIQGVLCSSFDTRGHHSERSGLEKEFLMNALKKKTIRVVPADINPDHIKLIMTNGVGYFNYTGGDLWFNVESYRVRVVLAASQIIRHISKEDSGFFNSGLNFRVKVVRSREIMMIRTVLSRFLIEEGNDINLIEEMKSENGGMIAFNKEEFIKTVKHNDCPLFDRLVQQIFGGRDSATFVVLTVDAPMEYTTENMLCGLDFDEKKKTVLTLNPFAKLKLIEMKGAGELENLKGSNEQVDPILTHLDQPYEMIIGPKLGKENFGRFDKWLFSNKWLAEKEKTASIESKEKLSKMKFIWEELYASIEADGEAYIVRGSFEKGYGVKEKGDEGASSSFSIVQNEEYEKSLTNLEDFRVIDLWDQNRDLVDHVVMHCPKNDQEYTAKEGYYSIQEITKTIFSKYPVQCRPVFHSEVYASLNSLTGRIGRSMTIRNLRTTPTTNQVIDKIAGLFFDSQWRDMVDEFQQHPIVFNEADFRSWIVGHKNAHKVISELEVLSAEGLLTNPLNKFRSHVKLESINKSNPISDFRQSAPRAIVWLPYCMPAIFSYLFKQASNRFKLFLRNCVHYASGVDVYDLRDIVESVEEEDFYFFDNDISKMDSQIDEEMIKVEWEMYKLLGVHPEVIESYKELKKNWIISNKYVSVKGSWLRHSGEPTTALGNGIINLAITALSTSKTKRQDMKLCLFMGDDLLMVTTKKEDVSEVKRKGKRLANSILKPNTNKTCGPFCSFLIGRDESNGRVSITPNLVRLAFKWEVPNGQHESTEEAILTRQLSYACILGKNGFSKQLEDRINKLTNGGLLVPHYYSDSNLLKFNAYHHNLTEMEIVEVANNLYNSINEPRTYNAKFIIPSEDIRKGIKKMSSIKTTGVGRESFTHRRLENESL

SEQ ID NO: 1287 - protein, 959 aa, Phaseolus lunatus alphaendornavirus
RKTSRIVEGSWGEITSSELVAFGQQLALPIGLNARLILDSLRDRQNKIDQWDWAAYGSYENFESRIRGVNIDSLIESDPTLVIPIDRVECVGCNVIAETQFDYHVKIGEVIFFGTTKGLVPTILVKMRNGRLCLYAGVPVEPISLAIRARLFRSKTSIISKRMIDQSTSGRKVFSLNKETVIKLREVTPGLNLKLADSALLESNPDAIVVATSFDTRGHHYERSEEEIKIIRDLLGTERLVTLPNAVSQSLVTALKKSNVGYFNYQNGHVWFNVETNEKDFTRLLAGFVDKITGCVGGFFNQGLCYRVDVSNLENVDGLVRLFNNHFELSGHKIRPIEDHIEAETEIFSVSKGQILSRTVALDSSTLESLLNDWFGKEESITVCRINEPGKIDWILDTVEYGGCLDKQKTRLLVLTPFLALNKLILKGAGLRNDKEENNREPEAVNARAQELVMDQPSEKVIGPQFGKENFGRFDKWLQSNRNLEERPISVREKAKVDLGKKKFVWEETYGVINSDGQIDAALPDTEKNYRVSEQLDFGTVTGFGLAARDTTEVGHLADHRVIDLWEEGLDLIDHVVIHCPTNEQKYIIREGNYSIIESVKTIFARYPVQCRPIFSDEAYASLNSLTGRLGRGLLIRNIDAKPKTHEIIDKMANLFFDNQWKSLVGKFQGNPVMYNEKDFLDWISKHKRADKVVKELEMMSAEGILINPFNQFRSHVKLESINKPNPVMDFRQSAPRAIVWLPYFMPAIFSYMFKMASDRFKLLLRNNVHYTSGVDVNDLANIVNEVDSNVFLFDNDISKMDSQIDEEMVKVEWEMLRLLGVDAEVMEVYKMLKINWRISNKFLSVKGNWLRHSGEPTTALGNGIINLAITCLSLHNTTRSNVKLCLFVGDDLIMANEVGEDVRLVKKKGRDYANAILKPNQSRTSGPFCSFIIGASEMSDRLSIVPNIPRLAYKWEVP

SEQ ID NO: 1288 - protein, 4619 aa, Phaseolus vulgaris alphaendornavirus 1
MAPKFITCLNSNNQAKLTGPRKRSQILKSKRRKHTYGDARRKVVNKVLKLGYHSQYINPIPQPKQTKPSIKQLGWVGLSKNRQIKQNANPYVRSIRKLFRSHKRQLIDENRLASLPARKEDLTMGFMFMSALEDKIAVCDLDPKIIGKLNYLVCCMGMGLMKDPSVSLNTIKGNIKHSYITPLNGGTRYNKFEDYMWSEDQTLTIVEGEGNCTEDFLKLIGAEMNKFGGIENYIMANCKARPDAMSNITRTNTGKSYKYDVVPCGMVPIKVCQLCGQINTYSHYEGHPNKGHYSIIDKKFPSGYEADLVEHDEMRTEIRGGQCEVQWRCCHCMGDLNLGVVGLFLNFVNLIKTVYDWMFVIRGNLDELLKSGYGDVYDDLELDQRQLIRNHDMQMIHEYFFHLNRKIIPCGHDTTEIMKSSIRAKLDACEFKHYSNYNSIKPELILEVSALTTVCLSRFKECATYSLGDILPHNRIKNYHQWYKYDGMFPIDNGEECTCTTQCQHHEPGVIFGSIMTCGLNLSYLLAITEKQGQLGFIIPKLTSTKTMADGTGKYNGDGESLELFLDGNPCPLIFKTDTFVTLSNSNIIVQGGKYFMISKVIDLELLELKMITGPYDELSALPLNKINTYNELTVTVNLPSPERLLGKWVGLNFQPMQVNINPSLFRALCIRNLSGKMSHEGLKEYSVGFALRKFVVHNKTISNPSVQYELLDIHIILSRICMMIMKLDYSNSLKYTEWSQLLGPLRGLTKFISEKLLIVITGCFMDYMSASTGLTSSMLIELLKNSHISTWVEGLCKDQFWDNLLKLATDYSVEQLKVINVQEDDATIPDSFHDACKHHNQSCKHKIQTGKAYCKCCGLSCTNPYCECCQPKPHDNTVMEWLHRDVIDEPQRKRIAPLKVNGRDLKVPKEDKMLDRFVQAFEDYKRDQPIKSAVDVVKSIKASHKGAIAVSTVANQSQPWPGIISNKESTEEQSQPAVQTSTIPILADSNKITEPSHQIPTEDTGSIPHVADQLSFIQTIESIDAEDARMKWFKQTPLKVPKHVKLNTQLESVKSKVNADLEMGDYLSVALKLGEEFLAHVLNPVNFEAERNDHTGYLYIMSHILVGINILNPNDFEVVGTPAAIPNTDDLSCGYDALRLATNLDITMSEFQMITGKKPPFSDGDINVIAQHYKLNIILKTDRDVQVMKYDSGCDSFACMVLVNSDHPDDIGHFSACNLRRVKCTNQYFCHKNDYDTLGRKDIVISCGIEPSELYFPTSITKTENIKCEAVYYYATDSTNPVVNVSKLSCIKIGDSWYLTTNEKFKVHNINKNSIYLRVPAYLESLSNSISLALKGEFSQLNIPEMYHSDANLPTTSEEVGVNMVSEVLRSMRRIMACEDKLDATMIKQTVNGRVSPWMANNIFIPEDGVHLKLKLWDKVILRVGKKLIMASVLGIDKTKVTIDTKFIVSTQAKLFELKESYGSCIRALVACCRPLISMSEFQSILDKSTLTLGPAGFGKSTAIAAKCSDNDLCVAMTSTSVESLKSKIKNKVRVMTVEKALYSHATTASTLYIDEAMLVPWQVILLLCAKGTTLSMFGAKNQIANVDMSSSPGIRHVVNIDKLIKASNITEQFTTYRIGTGLFEFIKPLEPGLLQGSDHRTSFSVTILDPEQFGTLSNIYNRKQYDVVITPYNYNKMAITNLLGSASPVVTTHSFQGQEVNSSLVVLKADKTGKWDLNSDPRYLNAALTRAKYNCDIVIFSHMLGQPNSVNDLLSQVGGREYHDENVIEFTELAVEDVIVRSDDSPINIDAVTHLSISSMHQLSDHDIQLLNELDLEQQGVNLKYKKLGAAVICEATKAGMLLAKVTNKGGNITIEASNMIKSLINNNLHKQVKIPMERLLSRTGMAKTHKVTLSTQSACKLRELLWIVDKTKDGTLTLPLNDGLITITKTSGCPLFAGCKMQIDDEWIYITDAWQAITSRTITYNFSASPCKLNDILIWMQLELPNIHLIPHNGTTWLDVIKGNLVTTYWQATERLTQVKYWMLNALAFSENPKCYGNNLRNVSKTNKFMRKLKIKGAIDYHQSVINHKTLILLEQGWFKSYVTLCSEDGSLISIHKNSKDLEIKEFIVEALQDIQQSEEADKIKGNDIGEMDIPGLLMPMSLHKQKRTPVYQYAVNELGKVISHLGKVSHDLIRVNRVCNQLFRHDITDKYPQLTISIANYHTVLSDVEQILEQVLINFVGKAIKGSEELIVYGGTFPLGVAICGRYYVQLRLPKNSDQFKYHYNEQLPEFHDLKARFVKNKTHDQHETNWDEEHSVDRLLLGLSLYQIPENELLELLNKSTSTIGWVPATNSSGSKFIKWHGNNSIMYRGAEYSVKVNNSLVNRARNGAPMFVDPITRTFYEINVLSEFMDHKLLLIVKRQFPTCNYVNRCIGSMQPATGYRTITVPWVNTNISSIISTGVLLHDKVLRISEKLLRSMLMRLATGDDSEESILAYARSLETTQIITDKSMHDMYGTEIPVLLSTAWYALYIHRGYNYKFKFLVQTINMASNNPLVLQFVSQLLPGVISMMGKVGKLVEDIAQTLLSAIEERLKVNNVFCNCKMTDVDFGWQLLEHKPHIIKYDLLKSDHYAAFYNDDDGGDDPDDYWLSSRTIYEAQPKDEVEDSEQQANLNISSKQHVEQSGENKPTESNLPENPSNIVESDFDEFHDAPAELGPDNPLINDIGPNYIELEQQHIEKVWNENHSKKEEFLKRCHYEGVENLNDIKYLWSIECGKHFVNEQANDVQCNNYYKIKPPTNTILNHAGKSVQRIIWCYWADGNPSKFVSQCIFSMANNNPNYRLVLIDDNMIKSLVKGETFECFMHSTAAFRSDLLRLYLLSKFSGVWIDASTIIEIDIEEYCKLACEHDSGVFQFSLCSRSDQNKTYESWFLVATQENKLLRKWYEITLDMHMNTYKFNRSTMSYLAEKYGQDLVTHCSGAVNINLREYLRVYITEKIALHLTDLHSVNCICDDEAKLTIWHKNNLKDWLQFWNTVANTTINDLTLSIGLYKFIGSTRAIVNNGMNYKTITKGSLLSKLLTYMPVKYNIKTMERIIFNAPSLPINLPPKASLYQKTNCVLLCLGSTGDMIPYLVCYDYLAGHGNYPLLISHKDHEVLVKGRRFHGLSIKSEDVMGIAMNLLYEKEITSSILGYHLMRNIAKETIEILTLYKSHNIKLYVYNPLYPAIQAMKSNSLASWVMLNPFPPEWIVGDKPESTWNKFKTNVAKWIVNLSDTIIRVDLNLPEHQSGTYQELTPMVCCPAELLPINDISNVICCGSLTMLNYYTDENFKTNFDSKAVLVSFGSCNIGVDTQLIIKILLICIKQGYKVIFHDGTNRAKFGTTINQFLTDYRGNVLITKSVNYANVREMVNCCIIHGGIGTLTEALANDITPIIYPIIADQHYWANKVKELGYGGVINKENYELELPKLLTLSSKFKVNRARDNFNISMLSEKLDNVVLSSNINNNIYTLTEYNCSRALMRFDFDGVKHCLKVDLNSIGYIRSCDFNYSILYDPPTTSHCIRACMEYIFDSKAFKTIELCKDRSVQLLLGVGCSKADLVNGILSLGLNLAIVESDVRLDVYKYFESPTVTLRIKKTGANHHCQVVNVTVINNLEYLTTLSRVVNSDEIHSRIIRTINDNKLSYSHMINIHMLLGLQKEIVRRDVNIRLRLDNLQHLMSRGDLNVVWLPVHKHRSTYFSDMMMPDKPLSLAIVTGTNKWEVVVFNIMDNVLLIHTSADLPSQLIFVNLHKTLIESKKPATKITYDIDEISLNKETVDYCYRNLLVPRSQRMSHNTFAKYSVIVSSYDNRSHHMHDELSILKQALQVKFHSKREVTLDQFLISYNEPINRLVLINAELYYNCEFENFEDANLMCQYLNGILHNRNNVLLKSAATDHQVKFLDINFKRQDRKLVRRLHIDENFVDQEITSETLKGLLMNLREHDSIISSQINEMFSNLPCSLHISRPPLEVKLLTDTPEMNLIALKTQAQQLIFPAIYLLIRKVKHGGATINQPVIDHDRDSWQDPKSKQLSKPGNWWNLTSTSANKKYTRVSTFEDVMCMNYLWIHDPVEYDYHPTKDSDPGIMNVYIAPYTSTYTGTVLEPLSDLPDFNAINLWSNNDLTDWLSLYSPINHCTIKMREIPTKIKTVEKVALTKYPIRSRAVLTKVCFEEGRSIIGRLKSVAFIRTITPAPKQVAIDLANTYFRSDWRAIVNQYQCERLIIKRRDVEQWIDDNKDCPKIVKELLQLLSGELCVKHISNVNVHLKLESLLKDNPIDYWRQQQARIIVWQRKAVCAVYTSVFVEAKRRLKAILHDKIVYADGLRPDELSARLRLCNSVAGFFENDLTKQDRQTDKPIIDAEMIIYDMLGVHANVIASWREMHETWMFKSDNYWGTGQAMRLTGQATTAIGNVLTNMQVHAKFIHKHWNTLEVGLFLGDDMCLVFKHKPSYHHLKNDIATMFNMQSKESWNSNYGTFCSMLCTKLPQCKAEMCPDFVRLKFRYEVTNGVHECTNNNIIMRKASYLMMLGDLPEVRNLIRELELPIKPVKWYNYHCALTAAGHKYDMHPDQVEGTLHQLLHLIKEGKLHKYTFRLFESGKHH

SEQ ID NO: 1289 - protein, 4920 aa, Phaseolus vulgaris alphaendornavirus 2
MARKLDKVSFLKSLGGSHHPKIQASHEHTSNRVLMRKLNKRNECSARNVYRQSNYKVKLHSSKTVVPAVMAARQGEELEFLEFGYEECVPDLNKIDIRTIRSMMQLFEQGHCHIDITPEEVQATLHNCQLQSTEPYYGAPGKLYYKHCRPLLTPRSKEDGTTTEAARDLLLGIIKKFGGSVLGMLYQDCANNANMTPHVYRQGNRYGFKAMEMAQPDAATLCCYCKTVNFVWLYGETDGLQKSRCGVCMTPLLLEHAVPEHIMWPILTVHDITQLHVGATELQNAAITLQLDGQPPITTKTMSKLIEQDFKNMRSIMSRAMAKTVYVPNGMTDFQHNHLTGQVPAYKLIRTNAMPNPHAMLAAERRIATIMFADKRGPGQTILDVGSRKNLTGLKEWHGMGPIMDWRDVERYNDKPLSTNICDHTVRTCECMQGKKPMVMCIDSIYDIDPCDVLKLMHTVQTNQLFFCVSTAEVDFESTSGLLAHGQGMWSRHKDKLVTSLRGDDRPYVNSWKLTKLWSTADLIQINQVELNLQTIKVLGNHLLRVLTIVPSGMDCLRTRQLDHRTMTQVDLVAPVIDVESWLNVFGVPKISYKLTKLDLQLYRALYSRNLTGSLSFNKLIEFGLGYAHVKYTTRTSTITHHHISADDIRLHAMLACVATRRKFAWVKAVTALNTTSNAFGLDPVEVVKLMSIDLAGKLVNEIWGALLPDGALKSKLSGMVDTVKAWINDPFWDALEQLNEGSKRFEPNVVVWPMLTAETSVESDYVCCHHNLWCEHEAKLEELCECCRLATKLSDSQYCLCCRPQAPKHKCAHHCYGNHGDVKQKGEINCTCCGLRTINGVCKCCVNKLGKWPAQQEGGIPLKYRREEINKAEKIVKSRTTTQEPPQTAQKTPPAGAASESGPTAHANKPSDEQKHSERVTEESQAELTILDKWKQGQASSSGTKTDVAQGMSSPNQQPKKNDEQVDQHAMSTEDEVVFNELKTLTTLDYACNVRYGYTYTVTEHLGVPNECNPLNLIGISELKYLPIGKKLHPPSWLTVMDRASVPGDGICGFHAINRVLGGNLSLVEMQRVTRRQTEFSADELLDYLAYLGKNGIILTKDTIASNKIDPFSDQYVCVRHCETDPNPKNHWEPCTVIQTEDMEYTPCFNGLFKQSQVNTKQLWMTTATTEIEHKNQVMRIVLELIKRAQPKQSAAAASELNLKLIDTLHDTWMSNNATMVNDPAAGLFHYKIRAEDYEYLACLVNRKMTADIKDDLIDPLNIGLMHDTDIDQLRSALLRNVVYQCCLMLNEGDGTERMTAELWTSMSIETTKVAGGLRMLQLGDTKVKTGDVISVNTISGPQHRLVWKHNGRYFCKEWMPPNHEKLRTTLHICRQSFKSAMIQMYCLSRNHIEFNKFKQLVETAVCTLGPAGSGKTTKIARDWTTDDLAIARTTVAVTSLREKLNSPKQLVMSHEKYSFTQPPTHRLVIDECTMFPWYELYFSLTTLPTSLVMYGDPNQISTIDTYMLGGERILDNIADYVPNKTLLKSTYRYGPKLCGILNSIVGEIVSNAPHDTMVLDLNLPTWDDSKLISIIHDAKPDVVLVHHNVTKRRIGKLLTTIKVETIHSYQSKEANAVLVVQYNEGGNSQIYMNKNYAVSAATRCKTKLVWVSVGLPDGMKLVDKLKGSSLDHRGEGLQDAIELTPNTRHIIRQAIDNGTISPATLTILQTTQLRREQIEIKPEEQRIERDLFTMEDVEKLVQELDIYNQRVWTPMDWGEFKNRWRASVPPGTKLEVDDDRRVLTAKVWGCTVTVTVQQDMSKFTMDLQISFLMRLAKSKIEKQFKQHYKDLWISEAMGRDCKSIIMDLRPEYRDDFARIVRPALMTNMVRPIPDTQPSTSTLNKDKVIVIDWQVTDDESSGGTQSTPRHAEIEDCDDNTLGDVERSGLIGASDIRFLYPVTNNMTPKQASLIADDTNPHLLPVKSIELLALVRAALPTIRLTVLFEECDNGYNLDLVSEESKVAMFEVTQHNMVVRSIGGTMKLRMGQLLLDAKLKVFATQTKRGGIWNRSPMLTDEQTQIVLAAYPWMQVYLDLDKAQDENVLIKHISQLDSYDYTARVAEFKNVLARYDELSQIYSQTGELVDVSGVKCCGPLLNESMIDAFGNANTVMTLNLDVGPTSNRIIRLLSEWTETQYDMGQMAKLDVLGSSVVMATYGGCTLCAGIKFSSRGVDLMKVGRQSTAISNRCITIYHHPDMSVTAALCHGLHLNDKLNLVTLGPLDYPPDLLADLDDTMKEPWFELGMIFERMSHMNKWLGSKITGADSEHTCDLYGDTNHGLLNDLAKQQPKLEIPLRNSVPTHRSLLNRPFKAIIKGHQVVMASYEGIMYCSNTMWAMRMSMRFMPLDVMVQRSYTYKANSWPWRLARFVTLNGSLANMMVGYDDETPTGALNLPLEYHENNKTIVHRFLCEKREEVVLSTMKKTHHVVFVSRSQLQNYGSMISRDCAGLPVEEQGCDTIDQGFDLLVEQMCLKYYYNSIEKGEGSVMVTDFPYLSLLTSSWGNFCIPGTNGGGFRYYQNLVDCNNMMEKMSHVYCIDERVNEENRDQSAYYKEMQEAIDTQIRTGTGPWFTNSNSNEPARITPKNLMGLVIAKLPCQEIASMMRANNLTSMNIILPQNVQSDNQLFGIATETQREYQFWYHNSNHLTTINKELLHMFMTGKCITTKYGTLVSHGANRVLGHCIVKLTLLQNAEMAPKYVRPIVHDNQTKQVVFKLPVIANFKMFLNGGEALIYKEVDMSLKMYRALSLRMLRPDTTIDDLLSYARTYSHTVAYSISKMTSQQPQMITKLMECCVCVFLESTRLNNATTRLTELINSTEFPLTKLSGLKDMAWFATIKMVTDVYKWLGVDVGIEQLLEMVSTVAKEAAGRIINNIDKLKAVRVSKVEHTDPLIMYDASADQTVISDHGPSKPVQFVQGVIKTLKLGKAAGYGMARSAQNLRDPRVDNLVAKPLAISKVVKQLEEHIGENKAEALREVMQDLHYDYPNSQLMEALIKVMENIDDKLKWRDMCYFGQIMGGEWHTVGANLAKKSKKPVNTCITLNQLDKEIKELQWMYPTECNHWKGKKIVFSTIGSRGDIEPYIAWAQVVAKLGSECKFLVPKDYVDYVNSYGFEALGLQVDSSKLINSCIQMEKHKWNPLQLYNELNEMFEIIEGMFKLNTTKLLQFCEGVNMMIETPFTHVGVQVAQKLRAPCLFSTAYPWEQQAGMTTRADSATIIEMLTGIAAFTPFRKHIEQWRHRTLQLHNPRGIMAHGSGNPLVYLHPKLTTWWKTSNTSACVGYANSCVKQVSEQDVELTKWAAEAKTIAVCFGSMTGDRRSSMTTKLMLSMQSQYRFLVVDGQTSYDQIKFPNMRQVSSCNYNLLFNAVEIVVTHGGSGTTHNALQHGCGVVIDPHFGDQFAWLKSVEQLGCGTSLEKLLKLDVNEQTSKLQQYTDTAQTLGGTVRAENFMVNLITNSEVLWQAASDHTTNLLANVVEPLVSLDLNCKNINNQLASGGLGKWADVEDTTVVITAEGPKFDKNHIKRSNQMEKGTGPQHNQGSSTTVHPQTGRNPEMGRNYKEHQSSHALTYVPTNDDLQLAAKAREERKEQKKQADATRRKIAVQLAEDRNRRKEAKEEKKEATQLRLEQSEPSKELETAASLAVETNPEGKPDGTHTLSKKSKEPKYPWGMSKDEDARGKEIISECVATAITEPPAAVYVTTTDTTIEPESMESQGERQAGPLRKAHEQCGTMDSKKLYTRTNLIYDLFEVEHTGINYAPFKIMSPTGQSVVLNPNEGTDCVFECLRMALTDEYTNDEDKSTIILRTCYQWMNIQTMPTTRQLEGLVRALHLHIGVQLPSCSINFPIGSATIEQVTYLEIIEGVLAAHCVLKKVSKPSVEFYTASNAPQMSFSINVMNAENAAIDDGLEPKLTMSSWALDLFNDSKCERWWAMMRTNYTYAEFMHKLESKNLVHTAKRMHAAMSVTNCTQSENILTVDEKVVANKWYWVTDGAEWYGAISRRVGERSLLITTASHYKWGELVVMVRTDNHLGWPIGLTVRERLARKIIVPGNQDVTALNKSTLYESRCKNYGVQLKGVQDTSCEYVAVFDYDNRSHHKYDDAAFLVSKGPSKSIGLGFDLTGDMWAKITNRTSAVRHMLNRGKLTLCMEFVDHQQRNTFASVLDASRVKYTLEGGSVYLATEEVSHAHSNLIQEWAVYMNASNGLVIPDRTLMERLKVGVPLQELVDQICPDINIKSAFGKRHPSKHTAVLTNDHARVKMPLTTIVKTEMETQDKYLVLRSNCIICELLPLTRGGGEEEPLFWRHGEELKVNSVTRWWNQPETEAPKTGFNKDKYLQINSEALTNWKAENTSVVQISTNPFNQAGDSTKMHYVGVTQWANVIDSQLGSPEIVDYDIMSMWDDTDFTDWNERFAPKNDVVIKSKATATEMRVTTKYTMVEYPTHSRPVLTKAANQEFNAVSGRLHNITTYRLKKYDLTREVRKFVDMYFDSSKRDKLKVYQTQQLTFNDAKVLDWLRDRPDSNKIAEELNNILAEGMQLHPINKLNVHLKLESLLKSEPASNLKQVKARALVWQCKGYCAIFSHVFKEVKVRLKDLLRPEIVYSDGLRADELAARVRLTTNVKFLLENDLAQQDKQTDHEIIKVEMEIYKLLGVCPHLVDLWKNCHHSWAYKSRTVAGVGDAMRLTGQATTAIGNAITNMLVHRRLVKTLGHNLRLFLVLGDDGLMFTTTWVDTTKLNNELKTNHNMMCKPSLSQTHGVFCCMMAAITDEGNCTLGPDVVRLRRRFECPNGVSEMTPDNVQARCMAYYMMLGATPEVTRAIQQQQLPIQPIKWYDADSIRSATMSKYNMDANQVLNEERLLLGMLSEPNSFAHKILHWHEGQ

SEQ ID NO: 1290 - protein, 4932 aa, Phaseolus vulgaris alphaendornavirus 3
MGEFLSITYDGLAWDCANAFGLNLFMLGVLQGGRVLGPKGIKAESFKSSYRAFTEKLMTLDKEEFSSKNDAIKISSMLKRELNLRLDHRGISEVAEYLGFDFMCPDPESYGSMIPENCTHDFTEAFLIHTCQFSQPGDFSRLIGEAIYTEYIPVEKRNKNGNLRNDCFVCPACGTLNSKCDPEVFTCGKCLSVNVEISIDITELSRYDESLYPISAYDHDLTINGPLANLTIQNYLDGGLLKLSKLSSELINQDVLRFVKARSRLQVKNQHVCSSLTDEEVFSLRYHFKNLEIIKRKTWNDTYGMLGSESHCLLASLLTKRSRIGVVKGFNPSFVNSQKHELIFGRPTHLLNWSETGLPDILGAQVFNYNSIPEVGHLIRAATKDEIFVIVPNILDQYNGFGSSNAFEVSTERGITTILFNGSNKVIVRPIKDYMTLLCNDYIKVGDKVFSVDRLDKASTCTLVRIKRVTRIEKMDVAVGSKSVESNNFKCVTLNLPDWQQNVKGLQFGPLLKRRIRFNVKFLRHLVSRCEAWPVSFHGLREYAIISSFSRIERDDKVNLLFSVPFEDIPDHVFCAYNLYLRKQLSTQVASLLTNERTMGLEHIVQALAGGIGNVLINLVDSQVLDTNYAKCLINDNETVNWLLSSQWAVVEESIKEWEVGKIQVVELDNTEIGLEYMVPDACEHGSEMNPIGHGCPCCGQPTDLAGRYCSKCSVDSPCEHKCLHQCRSKRDHFCSGILINGSVSEGTKMPCGHKAVTCNCCRVISCYPTCQNCFNWADYDNEMDNLVKVQIKVQEGEAPGMAVNRIISQARSEDVSGYQDGEENGDEKKVADSNLDGKAFPVLKSNRRKGRKNRDDYKQKVFKPRLVTAEARNNDEKEKKNKGDLIPEQKPDEGKTTDCRAEVELASQATDEANIKLLEMKVFNQISASSSSQAASESSQSDEDEKSEEEANEEENIAEKFKLMIMIDKLRSATDDSYTELILNSGKAPRLEVRAATSTLSYIHQGEVAVNLTNIRAVNGINADYEGGYCLRDSFAYYNAEINEVSWRDACDDLNLPATWCLYTEISKYAQYFSMNVLVVHQARDELLSANMWISDPNQDVNFIRYITEMPTEETYELNGHYQPCELTMSGCVSCVPCYTIDVTRDDVDMIYANVTGRGDINKFMDLTLEQRVAIGLAINENKGVGLFKVGFPNIEYETKPRGFFLCNNANKENNPRGGKLAIFIPDVNVGPSFHIPNLQTEFELTEWVLKNQLDSEYLSDELGIAKDRINMAVGQYLQLKLQVESLASGDKKFVQQIANRIKNIKFHKRKNYWFVITNPQLEKLKTGDVVLIRQGPSYYCCQVLRHLRKLIFPVIDDSGFNFQSEMVTFKTSYASLLIELDSAAKPGMPMHRLKQIMADSVAISGYPGTGKTRRLIQMSQLEPGVIIGVTRGSQNSLRAEAMGAKVRIISAERALTERANSSCVYIDEGTLLTVQRILSMLGPNVKKLVVSGDPSQIPAKEYSPICAYEPTNLLEFARNNGAEVVSLLETWRFGPRVCGILNEAFGTDLKSVKPNDTPFHLEHSDGLNKKELNSIIEKRRIDTVLVFTTAVERQVNALLGPENRVRVARVHSSQGDSRDRVLIVQDYRKGPAQSSLEVQFKREYMIVAVTRCVKEVTLMCTYETCKHRESSNTNIARHLNRELEVQYLASGGASETSILNQIIGGLSDQFNAELKSLEPSFMKDWASVIIGYVNGKINNAKYSHIAELVRTKNVGKLHDNLVQAGFPLITEVSTEDGKIYATMDYEQTDWNPLKKMFMMNFSRKQEILVKDNKIYLGGIMILSKANENLIEVEAGDFDAWKYTKNEGCLFYIKNFHEVVNEGECQTINMNVRLLNHSAQLTWNAAKAPLVIDYAGKKYYVKPTTGCSLCGGLEIRTKKNKLIVFVNNAYRTWTSRSLQYKSENNKLVRLLIGKWDKQYNDGHLWEILCPLIPNVKHHMLHAMLWGERVLSGLRGLLRGKTVNPVEGHLFRNELEFNERVLIRYKNEAARRGITLIWKNDPSLAYFRCSSFLFSANQKGKEGYVYFEKHSNPVFVKEGWVKNNQYKLVLELWRNELYRFPYNLAKITGPSDIKVEGYGELSRMLELDLEKHGKSNSKLISMLDEDLTRQAKDRLFANPEIQIPCDFLEDARDLMIHHKYILAPDLQSFCCGISYLLDSVAVKQYCANVTVKSKGFVTRFPNLSLRLDVERYTRILIPENLGSQRMYDNLIEDCFARLEVKIKVLQDMIPAENSREAKMAGRGKNGKDRYSEPRAIAGVIQNMINRRDLATLVDGLGNCTEIGSLAFGVSALELSFEELRKIKTNNTNDSLLMMIPDFRNENIKVKTAVQGNRLVFKGEVVDYEINPDWCELVSRLINAKRWETVECPDGLECVGQEDLFLVFTVCDKPQDIVRKLPVNMRNDESICSVPQLNSITEMKRTKSLFRLAEFSLDTELLGRLVRRAMIPGCSLETLQTIARNRMHSTTISKLGRKSSNKDPTTDASLCALVAMNLANHHDNQITRYMEKIEDFLLDNKDWKRANAALIHTIKMEMNTILGKVLNLRISIKELSEVAGNCLYTVLTDDNNLRALPRLTIKEQPHRIMYGQFFHHKLDVKNPDGFNFGPNIANKVLTNTVKAVLKMANEVKEGYWVKKENNTFSSTLYGKIQEGTEVKVVLHRYDLAGGLWDVLSKRLEISSRNSMITHSSVRIGNLEVSYGNGIKVTEVGKQSNGLQHSEILIGTVRISEEILRDIDESGKRIFVPKKYSPIGINCNLFSLWLLIKLGFLWKIRVDRQSSEQLGDVASLVPEFGSNVPRIILDTFLDNNSKILKDSEIVRRIEDCLRYTMETSRPVGNSELFCFIITQLTILTGLEEERLFRNIEEMRESMKMVEGGIAASTRASVIERDGNESDLCAVNVAGDPVENERKFRALEIADGPFFLVEQSKMKQFNAAYQNQDEDEITGLTVIYPVMEKLTDMAKMDEQKDDVKHVARSIILGLICQLVSGLSVSEFAAALEGINNEKIARKVKRIAVKITCGDKPATTVQTEPADDADKDPEDGDGDVKGKDSGKIGKMIDESNKENPNTAMDKSTGGLDQNGDESEKHKECRKSERVSHQSEEKKSGQRMANEKEAERKVTCQAPQETAEDGEAHKGMSFKLARYNGSETVSQLIKDVIESRDLNRNEFTVELATNTLVKYFLEAGVDPTINTISNLTESAIQDVMALADKLTSDFVFGIDDINRLMANKVRFNMYNSRSKVSGGNKLRGIKVGILAVGSFGDTLPVIRAAQILKNQGAWVALVTHADSPGLDGANIDKFYPINKSQEFTTGNIHNVGPTRKLDHALSHNEEAVAPVIKALKEHEFDVFLSTPLCPAATAHLVNKGIPTADFFCTYCWQVPESAMDLPLGEGVMTAVKDKVVDWVFSHGYPIAKQTVAELVLQNFNLESADISNTPRLVLSWSFLHSQQARDDNLCLFLGYTSPCEKLNAFEVARKKLKILVGFGSMSVNLDIANKVIEILRTMDPKLFQLTLHSQYEHKTRALRSSLVANGFKFKELTGYQNTGQMAVNHHVMICHGGIGTVQECLKATCIPIIVPVFADQPYVANNISERKFGIWYKGDPSSLLASVKKISEYQKRVIDLKLDTKTVENNLVDSILDLCVATPDKETDAKSKEVGNLAHEGKTVPINPYLIRNVLELPCPDPTNQLPGEYECSLKIEEGLIEKIGESYTGDDCLMEAMKQGITKTQQASGRARLVHSLSLFHITRISELGKLFAMAYYNRVNLQVLGFKNRTTIFDSRWPLVSIFIVPVNNKTGLNNLHAYLVNPIIQLSKKINRKNTNEDAANNEDVTNLGKIIGLPIGINPMGLLESLVTAKNLLVEWDWAAYGSYENFESRLHGTNIDSLLESDTGLIMPVDKANPIQNGVTIETRIDYQSKIGEIVFLGTEEGLIPTMITNAKNGKVYLYTGRETKPLGLAFRARLIRSKKERISKRMLQDNVMEGKVCSLNKETINKLRETSPGLNLELVTEDLINSCPEIKILATSFDTRGHHSERSEMERAIIIKHAGTQKLKTLPVDLGEGLVRAIKYSKIAYFNYQNGHTWFNIETASKDVTMFLSKIVTKMSSEKGGFFNQGTSFRLDVTNMRDVDSLVRLFNNHFKLAGHKIEFFKDENYCKEGIMTVRKDDIVKKTVTFDSSVLDQLILDWFEGEEEIPACAIHDLNEHDWILDTVKYGICLDSTRTKLLVITPLIALSKILLKGAGFVDEANPTGGDGSRVNINAKDLVMDQPSEAVIGPQFGKDNFGRFDKWLQANKHLKEIDNSVNNKAKVELTRKKFVWEEIYGCLQADGQLQVDADISTKNYRIAEDLDFQAEMGFAPARRSTSDVGNIEDHRIIDLWEEGLDLIDHVVIHCPTNEQKYVIREGNYSIINTVKTIFSKYPVQCRPIFHDETYASLNSLTGRLGRGLSIRSMLARPKTHEVIDKIALYFFDLRWKELTNTFQSNPIMYNEKDFLDWVSKHKNPGKVIKELEKMSAEGILLNPFNQFRSHVKLESINKNNPVMDFRQSAPRAIVWLPYFMPAIFSYMFKMASDRFKLLLRNNVHYTSGVDVIDLSKIVNEVDTGFYLFDNDISKMDSQIDEDMVRVEWEVLRLLGIDAEVMEVYKLLKNNWRISNKFLSVRGDWLRHSGEPTTALGNGIINLAITSLVLENTCRSNIKLCLFVGDDLIIANEVSEDLQMIKRKGRELANAILKPNQSRTNGPFCSFIIGASETSDRLCVVPNVPRLAYKWEVPNGQHETTEDAVFTRQLSYSCILGSNEFSKRVEKLIKDKLGGELQVPSYYDGSEMIQLNCKYHKLEEMEVVECLNTLYQRIEKPTTRQVTALITSENIRKGVKSMSRIKELTGDSDQFEHRRLIDD

SEQ ID NO: 1291 - protein, 4612 aa, Phytophthora alphaendornavirus 1
MSSTISNYQKLQSRKTLRGGRRTGVGGLPVALNQEQILTLRKKLNLKVTKRFNYLKSIDKKYKEMVKTSKYPGRLVPISKALNKKAMQRMTRNIIIPDCMHPSQLLAVKVAIANNTDKWFITRDAFLELKNLSELANGSQQEVRLSVLRSKLYKYTSIGKEVIPGEANYFRTWFKWLSSNYNNSMYWMWAKYQTAATILCDRIVETAAGCVMYIDCEPAPAETVVECAYCGMLNHMTSADNVMCGSCYGDLEVTIESAIPGEPIIELVLNMLQGHFGMAMLEQLSLSNYLDLSALAESGIGPSIINHDLMIVKQILSRSMNMAVKVPSNLSLKELSTLRFTLGTDMCCPIHPNTSGARKSSAEVSWVVTQLRQLTSSKGKIIVVDSMNVLQCLELQDGVIEVVNDIAEADIAWGQVEHVVIYLPNALELSCIFSAAPINVCVTTLQLDPKDPEMLTEWDTQQIGETVWWSPVYSNLAASQDVGDVTLLLGDHYTVNNHNTILNASKINKIGYFTRCEIHRSEGLPVELLTDVIGSLIEEEREFKIPTVDMDALVTRFGGAVIKTKTIALDRVFLRYLLNKTMLGNMGYNQTVEYAISLCYSRYVMDGREMNFSRISAESCRDHAYVAVMXTGLTSTEFKTGETVLGPNNGAQQVINVLSLGAMQGLWAVGLDLCEQLLPEPISEAVKKTITWLKQGNTSDYQTTDIWEKLRDWVYGNTFDSCKYYVETKWKYQEPESNCDHHSPDCDDEQVGVDDQDTLRCLCCLLFKASPVTKLCKCCTLSSKCNHKCSHTCTSELDHICNKKCKHQKILCDCCGVPTCFDECPVCQTPVTWVLPISLAAKEISNASRRNRPVHMAKPRKIDREKIEDQEFTVKGEPVSRVPVFKTHGLTLGLTGCNIQEVMENQAEIQAKVNELKLEDVEVYDPDTLESIGLFLLIDHTLISEPAKPGEHTISELVEEAEQRNASTSVDTTPREHQDKPVALDVPADKQSHDRLSMLAPVVRRACLNGLMKNWGEVQPYFKTTDADEAGTTQLVLLAEGFSSYVTNDWLAVVATHSISAEDNLCGFHALNLGFEGASLRRLREVSKKDDWFELTDLVNYMREEDRNLLVMKDEMVDVYTFDPYNSVYVSVEHTGSTSSGHWSPISMVQIKPAPSLPNWTGVTDRNTMSQILLSWGLSVDTEFDDLSVSQRITYSWMQYNEEVGRSKAIVSQTLSLSSENGVGYLHSGTNTKNDIRSGEVFLEIPQQYVPSMSMLNSSWSLVQNSFEYNQPHSYSDTIPLNCSQRLVQEVREQIKTLVQLGFTLDNYLPEIPPGYYNLHQKGRAQTISEGVVRCRLTKENIKTGDSILVVVSGKGYSVRRITREGAWMIFPFVTTQRRTTIKFLNPRSSCTSTLLRLQALLQTNPDTSRTLQLLQASECTLAVPGWGKSTKIVKEFDTDTTVTCVTSEAVKNLVAMGLPRNKVTSVERAVESKIHTKKLAIDECTQVDWLMVHMMCGDEVEIITLAGDSFQIGAVDFSASTGERTITSCNMFSLHQNTYNNSHRFGQPLCSQLTVLNPRLTTDALHQTSYSVHNLSSLDLNVLGSVIAQERPGVILTFHQITKSQIQRAFGRTIKTSLTTGDVKTVHSYQGKESSRVMVIQDFLSPAGVHTDRRYLMSAASRASNHLIWVTIQSPINSLVLSDHLKTNILVGGHLSDIIDNTVITLCNRFKFEMSLETMRNVVEYLFGEYESTHSDEITLKTIHITGPTENEYQRGYIKFSQPEEEFLRRGRTYLVTKPNLGSPSEEPEVVYIAEDWKPEGKIDERYELNDYAVSNQKTQVVFGTKRALSTLILPMSINTAGWKITLSKQEANVLVTIEKYGKTLNFIWDNQLGGVDLTNHKALQVGLRLLINTGLLERVLPEELHNLNLFELTLNEDRVMSNAELEEIAEMGSVIHMDELMDSEAIMEPSVRQGWTHLINITNGRLSSEIQQELIVESKNAPNESFYTHKTGMTLVNYSRLSKLADAARRTSLEELPLPLRTPFGWVDVKRHNGCNPCAGISLRHHDSWWLIDNDYYRKGSRRVQFNEESTRDEAIIYVLKGLQLEHTLEDVVDPQESSHPFFCVDGPGHEVWCSNHESLDFCDTLMDRISCFKTYTESKFEYKDFTENNLTWLQDVADKMEVFGMYNITKPGGDKNSKWNESLLQVLNADGSRFFVLYWDSVFYYVDCDNDDGYIQQFHSWVKVDLVEMANKLFEVGLEARRSRLSTLLLSARDTVFGAGVNEDGLILDLDQHKFNKTAVYNHLVQRMGEMKLKQSALSRRPFFHGKIAIETLKNQVKTTLRGGVVEECPICTGSSVGSELVTLIIAHSTDEPTTLMLNNPQLLLSNSLWHHKVRSSEESLFNTTFPSVRATFSRHANKVLGKITHSMKKYAMGEDLKSAGRLLAASNVLKKASNSERGFEVFEHPTNTCDNLIVGPLLLAEPDSLAEIWGNERIQVTIIVPAVINSHSPWYKVNSTGGNIQIMECGSGLTVKIRSEIYNSVLNKPNLTLFGHTRCTEVVGTLFDYLIVNTRGASEARPQKVWLRHPLHEVIKVPILSVNLGEDIANKSIVKWKEFRCDPVVLRRLELRVNRPGTNFKDLCEYARTLLHTRDYTRLGSWDTVKLDDLDMLSHCQYAYYHNKLGNKSISQMIELLNVFDQSGKNIPFYSWLKGLGVSKLLDVTYSTYAGVMRDTGLDLGLSQTLMEFCGFIDELVKNDTVKNSVVELWNNYEPTMYKRHVSFITWRAQPTATGEVGRLAYRLLKEFIWEPHFEGDDVLRDLIPRGAKDDGKSENSHTEEDFEQEHSDFKHAVFTSQGTRGDVEPVVKFINKIKHGYDLVTLVCNQGNGEGVQFPDDIRVVYIDMDGSKLATLASVGTGEGLAEVLSKLCEFEGSMRDTLEKLLSGPPVTTVYATSNCHLGYXLADLVQCKLVELQLFPWPFNPTTKLEKFVAGVTERVLTTTVDTSGLNRVKKTRQQHKCLLLFAPIVLKDIDHHFSDDLKLVKIDCSVLKPTGVKKEALVVTMGSLVGAGAIARYKASLQWATKMKFSHIYLVGNQFRADYMCDASAVLSPTIKHLNREGVVVEIESYLPYVEICSKDTICIHHGGAGTTNWFMRLSMRQIILPLFNDQWIWANCVSKLGCAITASPITLPHITEKELSKLTGKSGSWSFENRQLQGAHGINSSRIPDWTKSEPTERGYINMLPYLKEGVMSAANDVSIKMMNFGPLQLANEICALFQLADSAFDWHEKDNSSSGEEVDPEDVMQEEGEEVVPDLESEESDSYVSANPEIAASHTTKELEESASQLAEQRSLASHRIEVGDSKPSQASTPCVDLVVYQTPVVAYSNLATETSTDYPEMEPTVLNELELERSHAYRQDDREGTLISSLSKPPASISNVINWRSLVNVEDSRCEANQICDTIDLATNMDDSPLTTTTLENYHTVYDPGHNSPGTCVFDCLSWLFPNDKGDVVIQWASMLGCRSWATKKDIIVFTNLIGVSLLLRQEEKTELFGRQSLSLICLNLVERGGIGHCTVIHPDWDELLSKRWNASQTPFSRIDLKNAARCPKTGMHMIGRVPCGSHTHISDADLTSLSMSVSYWSSNKTTLDFIETCAKLTGKPKKDIAARLQGTNWHHLFHRRKMQVVTTFQHSYKNGCSWEKTGCNFKPGDLVTICFDRGCVVGVVLERARDYVVQYETRTSTPLYAISLSMNVNVKHTTLRRAVTLKGVQEEAFLNVKTMHYCHSIGLRNDISEVAEREKKYDSLIVSDFDNRIHHQFNEKDILKYQEADAITIVSGKSRAVMVTWIMTESDLRLTMWHGKPYIELKTKDTILMSILDSAGERIALGNDEYRWIPEGDDTRMLRVCDTIPRLQKLLNKTDEGLVELKWLTMNPRLNPIKVVKKHMLSEGLSEEGEMDVEELNLLLAVPLSELVILTSRSEIAEWLSISRHMFGYKLDGIYHSGAGGMINLAGPIVVYKKKLLPPSMTGGHLVLDIGDQHWNKVREQYSENNLRGLVKHGFKVTSPESAQQRATSNMERLKQSPLYPMLDAVRDMTQGSYSKTPLTFTNVRAHEVDKEMGDLIIPKILVDTNMGWELETAHLEEVPIHVRQMWDETDLLDWNASYAPSNQLRLKTTLPTGKRRTERKMIYTKYPIQSRVVLTKAANQEFNAVTGRIGNASIIRKYNLNIQYELKNMCRELFVANWQSICAGYQADQVSPSPENILEWLSEKPDGVNIGEELQSYIEDGFQTHPISDVNVHLKLEALLKDQPVESNQALKARIIVWQAKGICAMYSGTFIQIKKRLKKLLRAEIVYTDGLEPTEIADVVRGIKDFSVLIEDDLTRQDSQTDSDTINVEFGVYDLLGLDRRVAASWRRVHELWRFKGKDVRGVWQEMRLTGQATTALGNAVVNLAVHWRLVSQLGPAMKMYLLLGDDSLFFSRTTIDATSLRRNIADYYNMKSKAFVYKDHGTFCSMMAYKNPQGGAGIGPDFVRLKRRFEVPSGVSETNLTNTVARKMSYCLMLGNLPIVKKLVEDMGWPIELQQWYDPSPLIDSICDKYNMSSAEVESHITALVDMIRSRTMYEIDFDVISQR

SEQ ID NO: 1292 - protein, 404 aa, Phytophthora cactorum alphaendornavirus 1
DLRLASTLASGKRRTEKKVIMTKYPVQSRVVLTKAANQEFNAVTGRIGNATIIRKHNLNVEYEVKNMCETYFKPGWQRIVAGYKSNQLNFDEAGLLQWLSEKPDCIKIADELLKYLDEGFMINPISDVNVHLKLESLLKDDPVQDNRALKARIIVWQAKGICAMYSFVFIEAKKRLKSLLKSEVVYTDGLEPSDIVAELATVDQFTHFIEDDLTRQDSQTDKNTIDVEFAIYALLGVPMDILKSWRKVHEHWRFKGKDVRGVWKEMRLTGQATTALGNAIVNLAVHWRLSKQLSSSLKKYLLLGDDGLFFTSSSIDATLLRRSIADYYNMKSKAFTYKNYGTFCSMVSYKHSTGQPGIGPDFVRLKRRFEVPNGVSQATLSNVVARKMSYCMMLGDLKPVRELI

SEQ ID NO: 1293 - protein, 4433 aa, Phytophthora cactorum alphaendornavirus 1
MNLKITREYKNLENVNQFYKNRMRMNKTPYDIIPICKALPKNKLEKDRGSIMMADFLNPSSFLGIKWALANNTAKWFITQEAFHELKETSGLYRGSEQDNRITQMRSQWYKFLQIGKTVVEGEKNFFKTWYKWFTRQFGNSLYEMWAQYNQSPTIMSDRIFETFTGVKMFIDCEQTEEEQVCICAYCGMLNHKERDDQVKCGACFGDLELTIETATEGEPITELILNMLQGHFGAAMLEQLALCQYLDLGALTSSAIGPAIINHDLMIVKQVLARAMNRVFKSPSNLSNHQIGQMKFDLGSDLAVFAEPCLHGASQTITEISWVTSQLLMDLHEDTGGLVILDSIDLLSCLRLESRSCIVIRNIEEQIVAKCRKLLLINPNGPELSYAIGLMQHGVEVTVVQLNHDSKDLDSEWDVINKHQTTTVSPIFSSVVSQQSNTQVEFCSGNKYTSEEGVLVISELIKTYKFITEVELMIMPYMTNHVLETVITSQNKSIKEFEIPIINEEAILTKIGMPILSEVVVHIDRTFMKMLLNKNITGNMTYEQLNEYAISVCHSRYVLDGKEHNFKHITSLECRQHSYVSLMVSRLTHTEVSSAVSTLANNNNLQQLLSTLGLTAMQGMFHYLLEQLARPGLLELEEAITQTIRLLKTSSLSGEDNLDVWEAIKNWIFNPVSEHSGYYVKSDWDISVEYFNCGHHYLNCGDVRILDVNVETCECCNIMRPTQDSKFCKCCKVESECKHNCTHECSGKDNHICNPDCKHKKIKCNCCGVDTCFDVCPVCNNDVKWFIPWNHPGPFKLLQGKPHRQVRKTNKFVSNKPVEVEPKPLSKQISVKKEEPLTFKCHGVPLGLRGCDENTVRDNAKEIHEFLKTVPKSRIDKSELEVLSTLGLYLLTPEELVTAPELPATLTIGDKLGPMFDGKEHSREPENSVSPPEGAEDLVNIDHEYLNRASEVHKRAIIKGLSAEWPYFYNYFKSNDLERQGVSHIVLVPFSESVQYTSEWLSVAFEGTASGKDALCGYEAIRLGCPEVSLRELRDSSGKQNWFTNEDLSRYLSGLDKNLLILRNNQVQIYNNDPYSSEFVSIKFTMDADAGHWDPITVIQIGPCPGLPNWTGTSDSDTNERWLRSQSCDIDTSFDNLTINQRLEFTKFLLNEEVSMSKNALSDKIVLSEDGTGWMMHGTTDRRHDLRAGNVMMNIKSDLAGTFSMLNNTIEAVENSFEFNAWNTYTRDIPSDCTARVHQEIRECVKGMVMLGMTTDRRFHGIPRGYYPYHVKHSFQRISDRLVRIRNPKETIKTGDSLLLLTVDKNYKVVRVVRKKNWVTFPLEGESKRGVVKLLLPKTSLTSILLRVEKLLVVQPDTTKTKQLLMQSKCVLAAPGWGKSTKIAAEIDVETTVVCCTSEAVKSLKTMGVPSNQVMSVERAIESQVAKKTLVIDECTQVDWLTVHLLVTSRTEEIKLYGDTFQIGSVDFSGSSGDRELTSCDYYSLNKEIFHTTRRFGRPLVEVLQILNPNLDTLASHNTTYSVINVAELTVEDLADSIKIAKPNVVLTFHQHTKSQIQKLITKASEGKLHAKDVKTVHSFQGKEASRVLVIQDFISPSGVHTDKKYLMSALSRASNHLTLLTVNSPINSKNLKDHLEKLTITGGMKDTLTSKVSGLVTDLGRASLGLSTCRTIVEWLMGSYEDNHPTTLRVKYLPKQQPTCSSQSIRTIDLCTEDRSYRLEDKLLAINFSPIPSITNSVETQVMDEQPISKFGPLPPLKTSTREVETGWYLMLHNQISTHVLPINITSRHANVHIIEDGNVIRLTISTQLFSISSTYKPELQGFLLEFTGVKKFFADTTLNLFADRLNEQVINNIGELVKLETNYVIDDLVDVPDNLQQYNNSNTDTRSEYEWKPMIDSVCSISRIGESPTSADPEKVQYLGHMVDNCTIHSIKIGMTWANYAKVSQIVDLARRFCCESEPLPLITRYGVISTTRYNGCNPCAGLLLVNDDDWWLLENDYARMGSRRVTFSENCVFNKCIRLLVNYLGLGHCFNSFTSQDLELEEFDVYPSGDEGWYTNQDNLLFMSLLWERVKCAEWSSSSNNHLSCADESEANQKVLTAEKSRLESEGMMLHNTTMEDNLSSVSGSIFSCRDAGGNDLYYIDCGETIYFTPEEDDSEVIVPSNWTQIMFDELIAHSVRKGKTMRIPLYNLLQSRPLNFGADELNEGLILTLDQHKFEKTAVFDHLTQRLGELKLKQSKLARAPIYIGDLDSRERSQQLRNVCRGRIIETCPETRGYTTGTEVLTLLLGHYLEEPCTLVLNKTGLLLSNSLWQHSVVDSTELMANGINTLARTKFAKHSEKIIAKMEYNLTNFTRNLDKDKLLKSKKLVARLTLNEADSTNANRMFLEVPSKEQTLICGYHILLEPPKLEEKWKHNGSCVYIVLPIVEFKHSQWYSSTEHSNSEMILEEYPVGKSMKINKINLAEVFNQTTLTLYGHTRPITIVGHLLDYVVIKVINHATPSVRKYWTVHPVCERIRVPLLSTNLEEVMHEKRLLKWREFNFDSTVLRRLELRCMRPGCNFKDLVEYGKTMLHTREYTRLGSWDKVKLDSLDMLSHCQYAYYVTKQGDKSLRGVIGMLSQMTGNNGSLYTWVNRLGLDKLLDSTILAYGKLIKETGLDISLPDLGPELVSLVRELIGNHEWISAAEDVLVHYKPEKFCRQVSLLKFNVRQHQGGAIGATFGKMIKTTLNNSFGQPKRTHEVKSENLSESKGPKTEYSEFTKQLTDKSSTQSRNKRVLVVSQGTRGDVEPFYSIMNHYSERDVDVALCCNTGSYNKSKLDSRIKLISLNMDGPELASLISEGSGMTSSKTIELINKYVDTVTEGFHKLNKLEKPDIVMFTPQTRFAKYYCKTMGIQGVSCQLFPWPVEPKETLNKFTTYVSELALESVVEVAIQERFVKFKGTTPPLKHLLMYPKIGLSGINWSSGSDMKFLSSPIAEPIQPSTNADSALVSFGSLVGSKVIKRTINALNWLEGQEVKKIYLVGLLYDNWLSGKLDQKIQKKIALMEERGKKFVIQAYVDYKSIGNELSLVIHHGGAGTTKIWAELGVRQLIYPLFADQWLWARIVTESNIGMVITGSTLKLLTMPDVNSISPNPVSWAKANAINPVDSISVEEIFDWLNLETNTHGYIDMDPYVWVHLRSVIHESLDKMTDQGIVKTIMSIVKLMRPSESHTTSPESSSVVEQPKVPQTKKRIVRVVRKVTRTTKSVEPSKIVEIIKQPKLLGDNKSEIPEPLVAIKPHQKPMSDQGMRLPRVTGIWGNHMEFCSKHNVGFMDWEQLSIGNYRGVKYTSSRVLYDPSSETQNECVYFCLKYLFNGSNEFLDEWSSILHCRSWATITDVKALAVLLGVNCLIETDDKMLLSYIGSDYTLPLRMTTVGRVGHCVVTDYHIDLTDNALLPEEPEPMSQLIRSHFPMCKRVNMPRLGGPLCTSHTHISENDYLLLTSPISELLKSDQIVSWFEVAARISGKSVIDIRTRCEGKNLVHLFNRRKMQMVTSRPNAYKNAVSWHKQFCGFKPGDLVVSVGPNSVDISVAFERKDTICLMLSDSGERYTLWVSLSLNLNNKCGPSKHVSTPTELTEVFLNVGSMNYCHSLGLRTDITKLLSPSQTPDTLVVADYDNRVHHMFNHTEIIKAIDGDKLLIVTDRTRGLSINWIKHHGPIRTSLRKGKLTIELESKDELLINIISIGQHKIAQTETSFIWYLRQNDENSLRTLDTIMKLNKICQENEHFVNLKRFTLDKRKHPAKALKQLLLEFDLSQEGETVIDELTTLTSWDKEDFNLITDQDVITTWIAEHMVDTQYWLEDVVYTTKNWMLSLVGPVLFTKRTKAERLVGGHIKVVLPSQQWSNVVKFQESNNSTPQIVKHGFKMARESSSTPNMEKLMKHDIMNLLPGVRDMIEGHYTSEEVTDVNVSGYSCMEEEQDLIVMKPNIDTQLGWTLDSGFEEDIPMHVRHMWDDTELLDWNNSYAPSNDLRLASTLASGKRRTEKKVIMTKYPVQSRVVLTKAANQEFNAVTGRIGNATIIRKHNLNVEYEVKNMCETYFKPGWQRIVAGYKSNQLNFDEAGLLQWLSEKPDCIKIADELLKYLDEGFMINPISDVNVHLKLESLLKDDPVQDNRALKARIIVWQAKGICAMYSFVFIEAKKRLKSLLKSEVVYTDGLEPSDIVAELATVDQFTHFIEDDLTRQDSQTDKNTIDVEFAIYALLGVPMDILKSWRKVHEHWRFKGKDVRGVWKEMRLTGQATTALGNAIVNLAVHWRLSKQLSSSLKKYLLLGDDGLFFTSSSIDATLLRRSIADYYNMKSKAFTYKNYGTFCSMVSYKHSTGQPGIGPDFVRLKRRFEVPNGVSQATLSNVVARKMSYCMMLGDLKPVRELIAKYNWPIAPTMWYDYGGL

SEQ ID NO: 1294 - protein, 397 aa, Phytophthora cactorum alphaendornavirus 2
FNHVTSCLKLAMERYPTIARPSITKDYISEFNSMSNRQGAVKEYQKKNLVVDAELNMFVQNYFLKNFTALSGRYKGNAIEFDISASIEWSLKHNFPAEVIRDLKNLLDQGFEKNPLNSVELHAKTEQTTKVNKIARWFSEVISRSITASSYCIAALFSPVFTEAKKRFKDSLRHPFYYVDGMTPSQINYTISSIENVRYIIEDDLTQQDGQTSHGIIAVEFEIYKLLGVHDDVLNIYNRCHHLWKWKGHGSSGMGDAMRLTGQVTTAIGNAITNLIVHNRFVARNKSNIKFLGFLGDDIIFFSNRSLNVSKHGTETKEIYNMISKITHRERVGGFLSMVVHTLGDKPAICPHYKRCRHRYSVCNYTFSGDERMEKINNRTLSYCFMLGNIKQSKEMR

SEQ ID NO: 1295 - protein, 4164 aa, Phytophthora cactorum alphaendornavirus 2
MFIGSMYRNYFDPGHANHMGLMQVSDIYNYKHVLHTDRPFNPKLFVADQIRWRTSFDPEDHSKFIRTYGAPTELTKPAATSYPFHKFRREFIKYVKKQSRKFSITRSKVRADLLGWLSSRSDYIMPGMPRARIFNGQEQFSKGFYTKCNCCGAISHMPIDDWLSNITLGEMPTREQVCETIEQMYNAEGNGITINQVDRVEDHIKCGLGLECFNCGENIIQMNSLPPYDYVQTKFIEDYGINGTNIEEFKKMLYLDNPPPDELSASATAYDITKNKDIAAYLQRADRKYANSAFAINAELMARMSQRFTTTQFARNQHISNKTLSQVELEEAFMLTEASALFNHAVYIQPSAINVFHALADGFECITNSPWFTNANINLSNTNSNLMYTIISAFSNVDLDNIFVDQNFVLVPNFDSLNAEFVHNNIVHFDVTGSDLPSEWNLQASKLICKSSRVSHNSVNYLIKTVRTTKYFQLVYIKHHTKGEVHTGRLTAGLGELEVKLPTIDANSMLNTLGIYGSKWTMQTINTDLVYRILINAITGKKSIESILTYVAGTATTKYSVGGKIVDISSTAIVEGIPELTYVLLVLQDQERINRWCAWNYIGHVNLYDLQQELHRAVFSKILNWLRLYQPTIFKNVEDFTTTKHQATFSRDSVLLRTGMVPSLEKIQPFNLILKTNDTKHFGTSIKSKACVHHTSICKHKMALNSCVCCGMESQPNSRFCNCCVNTVVEKHDCYHECLHEHRCTVFNDTGKCDHFNYCNCCEREYCGDICKCCEKQNAITVKEIVQKPHRHEKKKVQMTTQPNQTRLDNAIKHTKSKSKFATTIKHFKFEEDNFKLRNIHDLKTAKELLLVSTDGTCLCPYVSICGVYHCLREPFEGIQIVDAIVQENYCGMECISRQTDVTVEQQFKAVGTKSSTSLQDLYDICEYFYLNALINYGNNQTSIVRYGNLLDPYIIITHSESIDSTRQRGHWCITVPPTITTFPNGYFNNMDLDCQTTRKMRLIDTFSVSITEQISFTQKLRSALQADIGIDLMQKLEMPKLVFKSDKYYLTNAMTTNIRSGAINAIVPKKFSSYCEMCFNNDKMPTELLALTAFHSATSSAEEIIENRILDTIREIARYKSDIDTGKATIEAVMQCDTTGPVLQLSPQLRVFKSLELVQVEFSSGKKELACTRKLQRDSFIAGFEGRIISVTSYRSSFGSLVRRLISLFNALKDCINIESAVVEKNVNGIGGTGKSTWIRQQTISKCAVLCKLRGNINRMKLLNFDYVNTIEQYLIDRPDINNIILDESTLVDSAEYISLFTKPNMHVWLFGDNDQIGVVEFSETPGWTKLQNAQEYCGKIVENWSKCYRIGQPLFDDVIKKIYPHAESVADHQTVYELHHYHNDTELLDIIKDTRPQTIYTFYSNMKAMLVSNLQGEGCEIKKVHADQGSEDEVCMVVYSSNSDQPEGILTDRKYITTAFTRSVRKLIVVTKHDYIESLSQIVDASITGRGGNVGKLLDDFGRLSRNITDLEIPFIKSQIFEKMPTAEKVEVSTDSISVVTVHNGVRVSIIVDSNGVYGGDWVSKGIVSLNRQSIVKSMKQLEEEKLHDDAFEFEGDIFLDSTPFSPNSIVPMSKPSVSKVYRFSASFWSFYIRIMDATILLQSCNKSAELSLGNETWHVKLFNGCSLFAGSIWKNKKFGKCTISSGHVQNGDSLLSNLNSHVRTLSGDFEAVEQIVRLMKDNELHKKFNSSSKHLFKQISNRTATMLKHNTCNFGCIETHAESSKHHNAELYDKFESENLGYAKRINYQPISKLVYMEENGNTLMYPGLVPVKTINDVHSQLMGIQGLDESYDANVSNRLIMDKILQRKIHAERARDLQCIVPENVFNNYSGLIADVINVKQLIKVPTASFNDSTGSIFEAVSITYMMKVLRCKSLVVHGFDAVVVTLQNYESVRIPRDELQVNELAYLESVNYSKIQHLKKMLSDGIAGNQKLDTERKLAEMENVAPFIIENDVNTNVHVYSFSNAVEQTAEHVYFLKTEDDDSVTVKQGGQLYMRGETSLPIMESNRFLPHVEIVRFGPVSLCKLVKKRQTKLVWDYKDTMKLKRFSIGKNREKIVDIPANLYTKLQARAMYDNDITIDDMLAYARNLLSTMVYTSGGTSLVHASRLEHIVEYVAVAMNVVKRNKAYFSALQHYTGKSQGGNLKQEIWDVILSRVKTWLMEKLDEFDIPDMWQAFSEYYLDGENESVVIKLIKTLTDTDIVQIFPQNKLIIYDQQVSDAELITRWKINCPSGKKLVEKRFSNQSPSKPTFKEETSHHTESSTTKADESSSLRQEMLNLMSSVESNIPEYVEEADTYTSDAKQTGTSGGSVQSSESDDDLCEVESVESDSIITKSIVYVEEERFENLQTTVLFNKLSEWLLPDLPKPVPYIHDCGQKLPNFDTVERLNDQNRLLWHKAHTWLTNKGYKFTIVKGTMLSAMRYGLLLPSKCYVEYITESTKTQGIYNNWVDSDYDIIIFIRGANNSQQNLEILNDMARDIGAKAMFRGENYSTAALNNYLDIELNYNTHDGMWDVLREHCNGKLNFASVDVGIVHYDDNYAYFTDDCLWQHAGLLGPCKIITAYVIPADDFMISIDYRTVTLSPKWLLHLSGILQTTDPSSTQLRSLMYPHAASFDSAAMLSCTNIKYDDLSCLLVMCACLSHTMNPFTTLIETDNSDITDLLNYTTDDVEYINSISSTSVHSKTKRKKLCAFFSGSNGDFVPLLNVVYTLVNSFDITCMVPGDFHLPLPLGVARFEYCDSNKHLVHGGDNSESLKKTISYIADTMRAGKFEFDISVGMFFSNEIEFVLVKEKCVKLWPVICDPWKGGRPPMSKFLRGLTTFKQNKNVQEVGCVPTGLSVKEVNLGWPMSEATFKPDEITLKFIHFSHKLRAKFHVITFGSMQFTEYQKTVQADINQHEECRILICTNYYSKDEVVHHANITANLSETLFTDRLVIVNRLNFMCIKEYVVSITHHGGCGTMLTGYFWDVPQKIVPIAYEQFDNAKLYINTPKLSIDLAKECETYRLGIKQVFDVDISMSVVMETFNNLKMSEDKVELMKFEFNSSAMTAELSQMSNNQIMPIETTIDCVKLSLLKVCHDKERVEKVYNQWSNVMSFSSITDVICLASVIKEPIFVSQNNICVKFGGFPVSLFGGDEESYGVMITNDGRHCNAASSNLGPVQIFPIEANWSEIPLVTNDVVGSISELMYCMINETDHPLNVVYKKLQLAKQFDISRVVFTAIRKSQSCVLINTMANFAGGFITDSLQPYYIWTVLSNYGSFACLTLPSQQGNICYALHGYDVCISPGFAIRHSSVKQFFVRQMQSTKYSSEVSAINQSTLKFCRANGYLVNTVTEGPANTLYVYNTWNRYHHLEKEREKIMYSKTLVIIPNNIGEAKIEELRKFDCHRRVIMKGDFKTIVETSEMHMQVMMRVYKSLNIFLSTIGNNIIIIKNVKKSMLIELDDAINIQVSDSGARIALYPNFNEQLEWPQSSTLNELFLMSGEIPTDWLVDSIRSAWHLIGDEDVLSIVMEQSSVTNMELSTVVKVIKGNVLISDNLIIFPNKFGIFRRVITGAGVVASNWMSTERDMRSINKFETVTEKTTTPAVDTSVLHQFLGVFKTDSNEEVSMDIISQVINNKVVLDAYENNNGEVSIELQKLDDIPDMKSMDYWENTTQLQDDVHILPTNRKLIMRNSLQFNHVTSCLKLAMERYPTIARPSITKDYISEFNSMSNRQGAVKEYQKKNLVVDAELNMFVQNYFLKNFTALSGRYKGNAIEFDISASIEWSLKHNFPAEVIRDLKNLLDQGFEKNPLNSVELHAKTEQTTKVNKIARWFSEVISRSITASSYCIAALFSPVFTEAKKRFKDSLRHPFYYVDGMTPSQINYTISSIENVRYIIEDDLTQQDGQTSHGIIAVEFEIYRLLGVHDDVLNIYNRCHHLWKWKGHGSSGMGDAMRLTGQVTTAIGNAITNLIVHNRFVARNKSNIKFLGFLGDDIIFFSNRSLNVSKHGTETKEIYNMISKITHRERVGGFLSMVVHTLGDKPAICPHYKRCRHRYSVCNYTFSGDERMEKINNRTLSYCFMLGNIKQSKEIAMQINPTVDIPDWYEVNDAIIANALYDQSTEFIVRSHLSSMLSMMKNRS

SEQ ID NO: 1296 - protein, 403 aa, Phytophthora cactorum alphaendornavirus 3
MRSRLQPNSLSKCIKIAMEKYPTVARPSITKEYLAEFNSLSNRQGKVVNYSSKPFNLDLEFKLFTQNYFPNNFNAISSKYKSETVSLDVDASIKWVRAHNFPKRVINDLKLLSEQGFERLPLSSVAVHSKIEQTTKLNKLSRWFNDVVSRSIIASTYAIAALFAPPFLELKKRFKDTLVTPFYYVDGMTPLQISTLLSTIENVKYVIEDDLTQQDGQTSSDIIELEFKIYEALGLDLDILEIYKRCHQMWRWKGHGIHGLGDAMRLTGQVTTALGNAITNLIVHNRFVARNKHHIKFLGFLGDDVIFLSNSMLNVSQHGTETKEIYNMISKITHRERVGGFLSMIVHTLDDVPTICPHFKRTRHRFSVCNYTFTAETREEKISNRTLSYCFMLGNIKESVAIA

SEQ ID NO: 1297 - protein, 4200 aa, Phytophthora cactorum alphaendornavirus 3
MKNSKLPKLTIKQCEFKKSMYIDSAFSSAYAEGHLNDLDITQMIDVYHNLDYRDDAINGRQTYIADRNFNPKYFNGDKWRWRNNYYGPPKAEPEPKQSIVPFHKYRRQLMRYVKTGSRRFTGYRQDLLGWLSSRSDWIYSGMAVERSRVYQGKCEFYKGFYAKCNHCGALSYIPLFATLSFGLGGDEAKVASLTKDQICNLLEVFYNKKTTEDGALDLDPEIYGSAMGLLTTFFGAAKLECFNCDKTIFETSHESPDGYVAMTHINDYGINGTNIDQFKKMLYLDNPPPEELQAATKAYDVNKNRDISAYLQRADRKYLNTAFATHAGKLAALAQRFTTAQFAKTQYLCEQELSTYEMQEIMLLAEASSLYAADCYLQPSALNTYHALSDGFACVVNSPWFTTTNIVVPNATDNCSHTVFSCFDNVNVDHVFDDGNVLLFPSFHALNYDQVNGNTIYLPVAGSDLPSTWDYNVSKTLSDASAIRHNGKTLKITTIRSTEHFQLVRFTLVSDNSTPAKMHTRLLAGQTTLRVKLPTIDSNSVLNTLGLYGSKWEMQTVNTNLVYRILVNAITGKKSMESMLTYIAATATTKYSVGGKVVDISGVQLVEGIPELTYVLILLQDHDRLIKWCQWNFIGNVNFSDLQSNIHRVVFSKLLAWVKDMKPKLYEKIEAMTTTKHQTMFSRDSIILRTHAVPSLETIQPFKLLDATKTYRVTPHQSSTICAHHPIGCEHGYTSEPCICCGLQRKPNSKFCDCCENKEQLDHKCYHTCDHVHVCEEKRNTGNCSHRSVCYCCRLPFCGDRCLCCFDEERDSKEITKPVTVTPERAKTTTTKPRRVEFKAQEPKPHTNQTHKAKFAQTIKKVQIDDETIKLRNVLDLKDPNEIQIVSSNGSVLLPYISICGIYNSTRKQIEPWQIIDPILTDKYCGLLCIEAQTDLTLGEMQTFTGLQKEIDIAGLYDVCEYFHLNAIISYGTDQVSIVRFGGLLQAYISLVHSGAVGEGRQIGHWSVGSPVEFTSFPKGFFTNVDFDTTITRKMSLPNTFEVNMSEQMDATQKLKAALRTSLGMEVSERLQIPVVKVIDGVCTLTNGAKTNLRMGIVNETVPDRYKALAEMAFNYERTPVEMQATTAFHNTESEPADILHNRIVDTLREISMHKTNLATGEMSTEATCEVQSLSSTVEIPAEMSVYKALDLVKVTYNDGSDSFEAVKKRSGTSYIAGLTKQVHSITSYRASFASLIRKLVSLLNGLHFIKNYHTHVIKKNVNGIGGTGKSTWIKSEMNKNCAVLCKLRSNLNSFKNLGFRYVGSLEQYLIDLPPIKQIVLDESTLVDAAEFICMHHLEGMEFYLFGDKEQIGVVDFSQTPGWKKLPSAQDYCGKEIENWTVCYRIGEPLVTSVLSRIYPNISTKADHPTLCSLTHFQNLEEIVSMVELYKPEAIYVFYTLHKRLLTGLLKKTGVVVRKIHADQGSEVSTGIVIYAGLAGYPEGIMLNRKYITTALTRCRDHLIVATSHYDITEIEQIVDASLIGRGETTYNLVNNAGELIRPIEMLEIPFIESKIKEQSEMIESVKVYRDQIKICAQVKGLKVNVIVDANGIRGDGFMSSKLVSLNKSMILKAMHDLQTEEVRMGAEIVDDEIFYDVEEHMVEDDKNVPTSGVLQANAHAMVSKSYRFSWSFWSMYVKVLDAAILMQKAGMIPCFKIANRSWVVKVYDGCSLFAGSKWTCEAIGYCTISSAHVQNGDSLLSNLNSHVRTIVGTDMCVSAIVSLMKDNELHGQFGADTTHLVKTIMNRTKTMLKHNTLNYGCFEPHSESSQSENEPLYTRFKKENRGFVEEIHYQPVSKLVYVNENGVGCMFPGHNVVKTVNDVMQHLQVISGIDESYEANMSNRQTMDKILARKYMAEQSKTIQVLLPEAVFNGYAHCVSDWINYKQLVKIPVASSDDSIGALFDAVTVAYMAKVLRPGKVIIKGMDIVSVTLQNFENFVYLVEDLDEMSKSKIIDLTIAKKNNLKSLLSTTLDAEKKRQYTQKLDDLENNEAFCVRDTIGVQCQLWSPYMRVVDNAEHTYFVKVDENSTVVNKIGGRYFFKGETSKEIVMSNNLLKHVEICRFGGVSLCKLVKTKPVKYVWDITETLKTRSFRIGNTGGEIIKIPNSIYTKLYARVLYEDDVSMDDMLAYSRSLLSTMIYTHAGPTAAHTESMDNLVKYIAVVMNVSRRNKKYFKAVHKFTQSATSDDLFSEIWNVVLSRAKTWLTEKVEEYNIPEMWQAFTEYYTNDNKNSVMNQMLNLLKDVDIVEIPSKDHLIIYGKRIFSQEITKRGFPECSSGKKLLQARLQQPPGNESQTSGTATSLAEQHTENVHESSSPPELTTDTSEEIEGVAQEIRSLGSDGPPSLLDDELFDESEEEDLSEETHLYDFEGGMLIENAVLSTAHGVIGNIENNELFRKLVTSLKPTVNCVIPYIHDCGQQVPELSEVDEFLTLSIEYWKKAHEFLMAQDYKFTIVKGTLIAAMRYGTLSPISCNVQYDTPHDNSQVTGAYNNWVDSDYDIVIYLNEKSWKREDRSKVIVDFAKAMGAKPMFRGNNDCVAAVNITNVPTLDFNMHDNLWDIIKDHCNGKLNFTSVDIAVVMYSDEKCDFTEDCVWQHCGLLGPCVISSDAALPNSELNITIEGTTVCLPKAWAMHLTGIMGTDTPTVAHWRQLAMPYQQTFDSASMYSCNRIIYDEMSAVIAMVGNSIIEKSALLWCLTDLRELVSHFRYMHEEINYVSQVSNKPTGINSHDNVCAMFSGSNGDFVPLMNLVDLIKDHCQMTVLLPEDFHLTIPKNCTVKYYCESNAHLVHGGNSSDALKTTIKYATAALNLCQIKFDVVIGMFFSNEIEFIPATKFQLRIWPVVCNPWKNGVPPISRFIRAAATMTKKPNEVEMGVVPRGLSTQEKNIGWPISFWQFNSDSTTDRVIDLMNKAKCKYHVISFGSMQFDSYVKLVQSDLDKHADDSILLCTNYTNMDAKITTHGQEYPLNLELLSDKLIIVKRVNFYLLKRFVKSFTHHGGCGSLLTGYYWGVPQTIHPIAYEQFDNAAFYLENPHITLNLESETQNTYEQIEKYFDIKLDCAEVIDKIRTIEYSGIEQMCLLECMMNGITAVHCELTEFNVLPIMVSRDCVLKALLTFCDDEDWVKSIFSHWSRTMELSTFEDLCALACVLGKPMFVKTSSDCILFGTQEQIRMNGLVLTEDLRHCNAGEAIVTPTITQPEMFDYQDVVLYDKLGDMTVNQLMQLVSGQLSGVDARLEKALSSIRNFDCSRISLTAMRKSKLCNLVVVKQVFAGGALVENAAPFYTWNVVTNKGECVCLTLPSRLPHTTLMIHGLSQSIEPVVCFRKNFVGDVFIPKSQQNIELTKVAAINQSTLTKCKQLKIPVRLISNEPSDTLYIYNTWNRKHHLEKEREKIVNAVNIKVIPKDITQKQKLYLKDFETHKLIILKGKPNYVCELDEETKSVCERFYKTLDVYKASHDQNMIEFKPLSRALTNRLDDIIDIKVSDSGANLVKYPLIKRDIEYKSEATLGEVYSAIEYERDDWKEDIIRRNWHLQPEEDVWSVQVTRGQVNNLSLDIVEGIMRSADYIGNDFVIFPQNWMIYVKRIVGAGTEPNASAWMHNVRDMRSENKFSLEKEVGQSNVQGERVLYDFLHVFKGSDASTQELDVVSTLQKDTKSVDMYETEDGTFEIEVMEIDEIPDMKSIDYWETTNQVQDQIVILPTNPKFKMRSRLQPNSLSKCIKIAMEKYPTVARPSITKEYLAEFNSLSNRQGKVVNYSSKPFNLDLEFKLFTQNYFPNNFNAISSKYKSETVSLDVDASIKWVRAHNFPKRVINDLKLLSEQGFERLPLSSVAVHSKIEQTTKLNKLSRWFNDVVSRSIIASTYAIAALFAPPFLELKKRFKDTLVTPFYYVDGMTPLQISTLLSTIENVKYVIEDDLTQQDGQTSSDIIELEFKIYEALGLDLDILEIYKRCHQMWRWKGHGIHGLGDAMRLTGQVTTALGNAITNLIVHNRFVARNKHHIKFLGFLGDDVIFLSNSMLNVSQHGTETKEIYNMISKITHRERVGGFLSMIVHTLDDVPTICPHFKRTRHRFSVCNYTFTAETREEKISNRTLSYCFMLGNIKESVAIAKKLRENVQIPNWYKVSSAIVANAAYDESGEFQVRSHLSALIHMLEQR

SEQ ID NO: 1298 - protein, 4250 aa, Phytophthora heveae alphaendornavirus 1
MSEMGQLSVAQLLRRPPQGDGNKKLKINRNNVQLFRLGVEGPGIPVLSLKHCLYKRDMYIDCAFGDMYSDGHTNSMGITELMNIYHNNQTYDVDKPFNKQMFNADQFSWRPEDPINAPMGKMEYKPPFQAPPVSSSYNFVKFRRQLIKYVRNKSRRFTGNRADLLGFLSSRSNFIYSGTMVERSRISHGQMQLYDGYYIKCNCCGALSYIPIINMVRELPVPLNKDQICTLLEKLQNKEFNEEGMLDLDMEVYGFELGMLCMMFENAKIDCFNCDKSIFESSHKTVYEVFSQVNPYDYGINGVTIELFKKMLYLDNPPPEDMPESRKVYDKIKNQDMQAFLQRVDRSYAHVNFKVDVQSNAGLFQRLDNIRFAANQNLSEQSLGVIEIEEVLLLSEISAMFNNTINISPSSLNIAHALNSGFHCLYDSPFFECTELPFTNTKDPQPYSLISAFPGIDMEAAVQENNFILVYNFNAVDYNLVHGHAICSPVTGCNFPALWSIQMSKLVSLYAGCEIRGDRFDFQTIRSTEHFQVVRVVKPSAKPTRLLIGTSHLRVKLPVIDTNSVVKTVGLFGTRWDWMEVNVDLARRIIINAISGKKSIDALLSYIAGTTSTKYSVGGKLVDLTSVALTDGLPELTYALVVLHDQERLVNWVKLNVIGGINVRDVQTHVYEVLSSKILQLIRVTLPSAYENIEKLFVEKHKLSFKRDSLILRQHQTPDLNSILPYKVLTRISTINSNYMFNVTSCVHHEASCVHEYSSKPCMCCGLAAKENSPYCECCLPADTEEHSCMHVCKGTHFCALKNATGNCNHAGFCDCCKLPHCFEFCMCCSVDVEVVEVERPVTSLKKTASKSSKPDSHDRARPNIQVPNLGQVPSTHTKKGKVLAKLTFEGETYNVRKIQNIKDPEELFVTTAEGSIYCPFRPLRNEVAMSHAGVDEHDIIDAVAVSESCAIECIVRQSDYTFNEVCSLTGYKTEHSLTDILSICQQLKLNVIVIYSNNAMVVARNASITDKYMVITHTEAVLGSRVRGHWCISTLPKLTTLPNGFWCNIDFSTTMTDALNGPNTFHTTENDQKTFINTLKELMRTELQFDGEVALKLPTVKQIGDEYFFSNSATHQIQRGDVNIKIPNEYAKLLESASNFDTVQIDVLATTATHKVSTSNKELIHERLVDTIREYGTIRGEILSGRGNVDINFDAICDASSFVLPQSAHVYKALELVRVRYEDGSSVVAVTRKHRSDCVITGLKQKISGFTTFKTSIASLIRKMCILIDGLRTVSNYDSLQIIKNVNGIGGTGKTTWIMNHVSRDAAIVCKLRATLPAFKSKGFKFVGTLEQFLLERPNVAEIALDESTLTDAVEFICLAIHPHMKISLFGDQDQVGVVEFSKTPGWTALDNAQDFCGVEVENWTETYRFGEPLVTEVLKNIYPTITSKSDHSTTYEFNKFTKLKDLVELITSANVDTVYVFYSHVEAALRHELENEHGIVIRKVHANQGTEGNRVLVVYSNFQPSPSGILLDRKYVTTALTRAKSHLIVATDFTSITDINMMIDVCFTGAGGSVSRIFSDDGSMIRELSLLEIPLINNFIRENVSNIDNYSVSPDSIKLDVNYSGVIIKVLVDTHGIHGRDLKSKMILSGRKHLVTRELLKIQDEQLDMNPEFIDEEVFFDTVESDQQPDDILEVKHSKMIQVKNYRLSLLAWNWLTKIADATLLIQHASGAAYLKLRGETIQVKCFNGCSLFTGFKLNSDKIGECTISSAHVQNGDSLLSNLNSHVRTFSGNTEMIQFLLTTIKDQAFLRSQGATTGNCVKRIIERTKTMLKHNTCNMGCCAEHGMSAKHINQALYDSFESANLGIIRKINFQPIPFVVYVDRESRLAVFPNHVYINTINDLMRLSDGIQGMDEGYEVNIANRQMMDKILVRKLQVERAGIKQCIMPERLFNEYMHTMDSVINQRQIIKVPAVTASDSFADFIDCLALNYIYKILNVRHFEVRGVDSKIHTLQNLEGVVCNVNSLDVQSKTIFDVVHTSKIEHLKKLIDQTTVKEIKDKLTHDLQQEECHPSFLCDDNTLPTSVYYNANQEVYQSHEHVYFIKVDADSPHIIQQHGHSFLLGETSNPLAKRNAICKHVELWRFGHYALCKMVSTKTIRLQWSPLTTRKIRRFTSPMPSMEIIDIPSDIYRKLLSRALYDTNVSVDDMLAYSRSMLSTMVYSSTGVTSSIATDMSQMMQYIAVVMNVVSRNRAHAEAVKSYLSTGDDGGIMSMLIQTVSSRIKTWLAEQLDEIGLPEMLSAYTEYYDTHAASNSILHKIIAAFKDVDIVEVHPTCKLIAYQGKAKDHSIIRQTKRNCPSNSKLVREEQRETKHVPMGISSMGATEYQESGAPSQQQRQQGKSTKQLDGKNIEASHKDSVGKMLKGSQLMGDSNIPLDVPDIPELEKSDASSGSEQNDSNSEDDESDDTSSGLETPLEQDEFNSSVLINGKIIRDSYNNEFSRYMGLYYADLSPIQVCNCNEYHPDQTLINEYLTASKKLWTEARKWLEASDYIYTITKGTLIAALRTGKLSQPTCNVRLSGGGTKIVGNMLNWVDSDYDILVFVRKNSRVSAKAVIKSLADYIKLKPLYRGATQATAILHKKLRKPMPMAKHSNVWSVITEHCGGIHDVVSIDVGVVMYDDDYAYVQDEVLASHFGLSDPAIIPTEVILPSPDNQILLEGNPVSLPGRWDILLSFYNDKNASAVDNVRNLMMAPVEHFDNAAMFSCNKMSYNKTAFLMILDACERIGQSSGFSKWLELEMLVPTTFDFIIFETQAKEAKVHTMCAMFAGSRGDHIPMLNFVYWLKNWIDITCLVPSDFSITLPHEVTEVRFEVDSSHFVHGGGKDNSVIKQNIKYVSEVLSRTNSVYDVVVGPFFCNEVDFIPASQFKIKLWPVIINPYKNIPLIKQPLRSLILKTFSVTNNVETLDFACVPKAFNPVDKSLGWALSPLNFESDDVTVKVIQAMSRTSDLFTVVSFGSMQFANYKETIENILTSETGPFLLCCNYSHQDGSIHFNNTTYNLDELTFTRDLIVVKTCNFYLLKPYVKKLIHHGGCGTLLTGYFWAVEQKIHPIAYEQFDNAKYYLENKAPILNIEECLNSFQHEVLNLFGLKSKYTEYKIPNAVLTRLALPTTDTIQVRKSIKVMHGFVTDMEIQKISVSTDCVLLSLQLLFPDLADHVSEVYRSWQQIMDFTSVSDIVCLVLTLQVSVHIVHSGESIIVEIDDSSNDAALIISEDLRHCDAGHVVTANVPHVSEMISPMEVTVPGVDNLTFLSKVVQVFSKSDFGETALEKVLLAVLSKNPTKLSFSLIRKSKSCYLPKIIKVSAGAVVVDNLPPFYTWQLLTNVGVIPAVSLKSSDGSTTILYTGFSSVVVPTIAFRYNNFESHLVVKGTQKAKSWVKACINQTTLNYCRSKDIPVFGVASEPVSELYVYNTWNRKHHLEKEREVIMHSENIRVVPSQLSMKWLRLLKTLTKHKVIILKGKPHFAVELSNKQPSREVTKKFYASLAAFETIALEDVVLLKNITSEEIALLDERMTFAEDDVGAPQVAYPWVLNTTPLEMGTIEEMFDQVNVDLDDWKAQIIAEEFHIPVNEVHQTIVVRCERTGLRVSTALEILATSEFCNNGILSFSKHWLHYKLQPVGAGQDHFNEANAWHTTERQHRSENKFDVVTASSGTSRSLNTKVLLNMLHLTSGIARESEADMFAEVCRDAKLIEFYKMENGEHSIELQKVDNIPDLSSQDYWDTSAELQDHTIILPSSNQIKMRGRLEPGDLTKCIKLAMEQYPIYARPSITKDYLAEFNSFSNRQGQVKRYAFKNFDIESEHKMFVANYFIEDFSNLSSRFQTMPVNFDFEASVNWVKQHNYPEAVIRDLERLFDEGFESRPLAYVEVHPKTEQTTKMNKFSRWYNEVVSRSIVASVYSVAALFSPPFLELKKRFKDALRDGVIYADGMTPEQLGAYLRTRKPCRMFIEDDLTQQDGQTSMAIIELEFIIYHDLGLDPHLSEMYKSCHMSWRWKGHGISGLGDAMRLTGQVTTALGNAITNLIVHNRFMVRNRNHIDMMAFLGDDVIFTSDHALNVSNHGTETKDIYNMVSKVTQRELVGGFLSMIVHNVGGIISVCPHFKRMRHRYSVCNYSFSGAERETKIKSRALSYCFMLGNLKESKDIASSITTGVNIPDWFDWPQAIEANALYDDSNVFAVQSHVGSLCSMLKNFQPIEHEFAIVGKPKFN

SEQ ID NO: 1299 - protein, 4806 aa, Plant associated alphaendornavirus 1
MACLLDIKVLSRISGGLHPHSSGRRGRNLTPVSNQKLHKNDSIRKMFRGSKHVIKTNYNTEAIPAVMSCHKREHDQFIQAGADMCVPDLSHLDERAFRNFFMLYMEDHCHMDMTKENASELFKSADLQNSEPNLGTRAYWTTMRPEVIPAVKDDGTRDPVALKFMMDLIKQKFGGSLRSMCTMNFKLNPNLTPHIYRRCGKYGYKAGEMASPHGIKQCAQCGTCNFIWLPHHEDKLSNQHCGMCFFSLDLKHMNNEWFIPNIMVEDINQLHVGALQKDMSELMNQLDGAEEFSTQTTNKLVEQDLKNVRAIMSRRMFRTIKVNNGMTTQQLNYLKNHNLSFHLVQSRSTPNPHAMLSAERKIIWYSFAEKLGHDRTLLDVGTRKLRDNSLEQRWRGMGPIVDWRDAERYSAIGLPNNCCTHTVNTCDCLVQKRPLIIAVDSIYDIAPGDIIRLMRRCESNNLLYSMTTAAVDFEAVRGDLYFDQGQWSRDADKLLTVLKQDDRPYENNWHLTKLWATADVITDGEWSLQINTYNVVGNHIMRSATLTKSKLEKMKYKEADQIKAHIRLNVPIVQCDSYLNNQFVPVIAYENRTIDVNLFKALYSRNLTANLSFDKMVEFGLAYAHTKYTTPTRMVSYQHVTADDVRLHVLLATVHSRRKMFWVQETELMNDPKSVHGVSMTGSSWTVVVEYLLKLVLEYGTKQLSRFGQLELASKVHSKLQPWLEDPFWDLLDQLWDANHKTGLIQFDVSDIESLESVQGQAVCNHHNMTCSHAVPGEQVCACCGIASVEKNDLCFCCNTFKCEHRCNHKCVDPSEHMRGNEKIKICCCCGIEFNTTHCVPCVINPGKQPNRQEPPNPRVKRTQFKVFPTDILPTNQTLDSTEPPQLHPTKRMRTQRKWKPRIVATPDPADPNNVSDTEIPEDFVFNHQTKRITLYDGWLKDMYGDELGSEAKTVANLKGENGSIKTSQAESVELSNAPANNLSAAERNAPGLEDEEMTDDDIAAIKLMSITSHAYVMVVINGLHVAVSQGLVAPMDFNPENRVGISQLRYHKFGTSWVDTDNFVIEQTAEVPGDGLCGFHAIKYVLGDEANLPEMRHLTGVKDWWSDEELANYLRHLGYNSLLLLPARSLVTVVNGMDDRFVCIVHGTIKKTNYMHWEPANVLQVDTKGMMPCWQGMWTITQENKMISSVSEYQLIDDLDERERIDLAILLIEKHRIKHTNHKGQQSNIVVKVIEGKNYLNNNGANVMMPRAGLFHFEIPETWKSAIELTNSPLHGKSADDLMGRVFDVPPLYNADVPSALASLVAENCAYLNSIWLQASGRLKVENSMWTKSVQRTKMINTGKRRFPLGSTKLKTGDLIMLELDTTTIPVYVTVQKDEVCFTPPMEMSQSLVTCRINVPKSSYKSRLLQVWFASKAQTNQTKLLKLLENSHVTYGPAGSGKTTTMIKNLKAGDVVVARTKVAVETIKAKLHNSSVRVLTYEQFCVQSPKASRVYIDECTMFTWLDVALMCTEDLLELHMFGDPHQVGTIDTGILSGTRDISAAGEYSKNIEHLNKTYRYGRTLCEYLNRAGIEVESAADHDTEVKWFVVDELNDEVFRQAVTTSKPDVILTFYNRVREKLSKLTTIPVVTVHSYQSKEADSVLVIHCAEQRVTSKIWLNRQYCLSAITRCKRRVVWISVGLPHSTQLHDILRGDRLETTAIGSHTPDMIVSEMVSNWQNVSNDIDDGDCIVVSGSPQPSTGGADGHYRMNGKLTNSVIAELAKPFKHNVLANWTHNTVGDMAVMARAELPSNVKVEVHGRVITIDCFGTITLEVSRDNAYCSVSYSNFVLARTAKPVILKGYQDEVVNKLTEVMSSGGETDWFAQLPISLQTELFTNYGNELAIHKVEEQSEDRFYDCATDFPEEANVFRSPKETFDEFCVLKLAHILMDDHVKEMVETTIGRLSVGMTKHVTDQGEVVTLLSKNKVLLKYWVVNAGLELKLVMAECQPHLVKNLTRLVNAWNDIVLEALGQSNLWYTLKSEHKRHIAENFRQVVRVESMQFMSPTVLNERFKQLIAEEGIEGMEAMNSESVEQLLVNIRAHPASYPEAVELTNMHNSHNSLCLCGDHQAWWNNAEREPEFMYDVVWPSSRSTTLIRLLAENIQLYETCGAPCFITICQTMIGLETFGGCSLCCGIAFIADGVVFLKLSPRKTIVDKRMLLIRQNHLQNEACLVLSALEITDCQIFNYVDAVMPAGLAEQWLHDIIRLPGYELGMLLERISIVPAAMIAKLKHPVSKRLCMQSDNDNKEYLSEIKHQLRPEWSLTSVNKISGHVSARYGLVSIEKENFMAYCWWNDSKLYVTSPHVGMHPENTIVLQLHELVAKLLSHRINRWQWRIAMRCKLSRNTQPIGFGSDEGAKSLNLPLSYHRANKTAVFEHFRQRVESEKLSSMIKSHHIVFVHSKQLERYGHLLRHECANLPVEVQSYDLMERGFDQLVETIGVKYVYNGLDYHGRMTVATVYPYLSMSTSSWGAYCHPLIERNVTRYMRNVLDCNPILAKMNMVFSKADLGPKDKVSSEYYEDMAASITHQMTSKVGPWFTEEECNPPARSTHLYLGLHMLASSPTELVTIIANQKTNVAIVLCPLLFNSNNMLFKMVSETEYTYEVAYDGSPDTITVNKKSLDMMLNGAMQTVGNKVLMSHSTSIILGHAVCRLILCDSNTPAPNYCCPQMQYAVSRKVVFTMPRINDIRRALSECKLVETKKVEIDSKFYRALSLRMLRPNTSFTDLLAYARTYIHAVTYSNAAEISINSRYDTDMMEACLCVFYESTRANESMEMITELLTNSYRPATNWNNVKTSVVNLMRTQLGSLLSPLRPETKVDELLELIALLLDRSEIAAIKQLKVLTIHKIKRPSEQKRIIKRTDNTLVQANLTEILKNAGDMFTNSINLVAAGTNRWWRLSREGFHDSTLKTSVKTESDISTACRFLETCEGLPLRQAVASLLNANVLRGDLTSIERVVKQVLQDVADPVSLNPVRKAHTQLVEDLGMPDSLKLMQPDVSQDVVVSMEEMKRRVVKLKWMYPTQSMKLVGKTIVFSSIGSMGDVEPFLSIAVWLREMGAHCKLLVPENFVKHVTLAGFDALGLPVDSEKIIKNCIDFEKTGNNLLQKVNVLMELFKMTSAVFSVDTERYLNFIKGADLLLETPFTHIGSQLAQKMNVPFMLCAAYPWEYSNGYNVKGEKQGLLDFISGALTYAPFIQELTDWRKLHLGLETTAGTLVSAGGTPMLYLHPKETTNWKISVKSNEIGYCEKPLLALSQLELETLSWVQTKPTAAVCFGSMVIEDYQSLLNLVMHRIPPGIKQVIVVGYKGLPFKLGHNKAAEIKFIEFINYHALFSVTSMVVTHGGSGTVHNALRHANCVLVNPFFGDQHAWSEMLRKNDAGWGIHDSNLNLKDGHWISNEQFLRKKKAARKIAEEINQSSPMANVVSNICNILEIAETNTANMIENRYWHGAILPIYNHEKITTLKLVSRNWRELAEADSLAEELMANWASQEQSKFLINQNTNLDTSNHSSGFSSTEGSGKSDDIVDGENNHLNITTTSWDDEAHQSGSNETKSSAVAIEVKTREKVTDDSVNPIKKRRGFTGKLVPNPVLKPPQPSRNEPITTHPSVDLKADCLCEHAADESHIDHLWSFSDVGSKLNIAVPSTRMSIHRLMSAKEVRTVLDPQNDGECVFDCLKALLRAHHVPDVVAEPQIVEIRRMFCAGIMPNFNEVIGMMTLLGLSVVLSNSVTNVVISHECGQPCQFKLSITYNAGIGHCKLIEVQDVELGPVITTKTMRFTSLKKQIQQSLGIIVSDYQVYKTDLVCKQTRNQTLLYESLHVDIDNTRARMKLDKLVFTMRRHVQRCYHVSLCTDGEIYYTLSNIQVNTGQMVLIQCSDTYVASLAVQVGNGLALIPLAPPKNMRATGTVVVTEIKFGGPIQPRSVTTLIRLNDVDVHTYTNLNVITRDFVMTRTNLVGCNTVANESATKLLIYDHDGRAHHNYDERNILMRFQPTNIVGVGFDYTGDMHHALTCRDTKWRLSVVNGCPTITMEFYDTHKTLGTQTLLHAIGLSPVKVSNQLTVPYSSVTRERMSLLNHIADNLGLAEGLCTARVDGKYSQWVPITQDVLKEFLVDGDALSHLLGERYDRFDIRLRTTQLTHVGEEVNPTYVTCVVWSKNTLGFSKACLNFDYRLRVVVGGDDLEERVLWKLPTHFQASKHSRWWDQITDMPESNFTREKWENALTTEALSDVFSSLQMGEERQPQVDGNETFGDSFFVPSTEWHVTPQEWKYSVEIPTCDDICLWEDIDLSDWNEKFAPINEATVTSRVPPTALTTSTKSTLVEYPKYARPVLTKCANQEFNAATGRLCKVVKYRKYNYQMDFEWNQFVATYFDKAKLHLLNLFQVDQLTFNDNKVLDWLSQRPDGNKIAAELEGILSSGMEVNPINNINVHLKLESLLKEEPAKSIKQVKARPLMWQCKGYCAVFSHCFKEVKQRLKQLLKHNIVYTDGLRADELAARVRAAGDFKYIFENDLAQQDKQTDMEIIEFEMYLYKKLGMNPGMVNLWKNCHRHWKYKSRTVMGVRDAMRLTGQATTALGNVITNMLVHRRITQQLQDSLRLFLLLGDDGLMLLDSWINVDHLNTELKHHHNMMCKPYISTKVGTFCCMLLTKNHLGISTLGPDFIRMKRRFEVTNGVSEPNDVNMQARAMSYAMMLGRTPEVAALIKRKGWKIEPMRWYDMDSIVSACASKYNVSVDSVWDNYHELIDLMGQQHVYQHNFLHWVEKL

SEQ ID NO: 1300 - protein, 4944 aa, Pterostylis alphaendornavirus
MASTLHTTAIVPHLMGASRRPSYSHHGTSRSVHMVSRKDAVAKQGISLRKAFRQAKNKFQVTNQMSVVAATIACRSDEHMEMIAWGPEDASPDLAHMTYDTMRNFYLLYRDKKCCFDVKEDEIDLLCHKTRLQVEDRAWNYSTRHYYKHKHADLIPPDVVEYGQPVNALKLMTKILAKYGGSIQSMLERSLAISPNRTPHISKCGNTYEARCMEYTKPKGIFQCSHCKLLNYVWLEDMQYGIYGQHCGCCFYELDLREVNPHGEQTTMPTIVDITQIQVGAMELSMAEACNQLDKQAAMAPEVLNMLAQEDYRNLRTVVSRSNRQTLRVPNGMSQTQLNHLVNNAYGFVLVAGIQTPNPHAMLAAERLICENIIYDHRGSNQTCTMLGQRRTIEENVIKNKRYLAPVKNWRDYERFCDKHLNPGDCCHELSQCDCDKKVDTMLVAIDNIWEWEPEGVMKYLERNNVQTLMFTTPFNRVSFDKTKGELEYDQGHWCKVGDKLIVAIAGDDKPYVNDWHLCDMWQNETILSNGKHDLVILTYKRLGNHTIRVAKLSNCGLKDLGSQFLMRTMSENLEIELPTFSPDSWLRLANVPPMVNTTFTLNVDMFRALYARNLTAKISLDTMIEYGLAYAHVKYSLHDRTLSHSFVTADEVRIHAMLAIVACRRKHSWMTQALSVSDPNSPWGFNMTSMIILTALNGLCNLLLGTGLTKLTDWVKTHTGMNLLHQKMVPLLNKWLSQPMWDILDNLSSMPNASEVKVRQLKRTVTPMIMVEGVVCNHHHQMCNHEYSDFDVCVCCMVVKKSINKETCECCVSHRTCVHKCKHKCASPYLHVGDKPTHKCQCCGVFTTTVECECCVTGNRKYPDYQGPPLNHAASSGLSEPRREVKPVSHQKPEGVPRQPVAGTKTPIHVESSQTKKKVEVNIFDKPDAAQSKPTTVEEPTPVVDVPVEQASTKDTSNAYTTPPVDTTAQLVNGLAIRTNVEYAKIVELGPIMAWESNLISMWDPYPTGELGVSELKYYVCGESFINTDYLKIVKNIDVPGDGLCGFHCLQKSLGDMVNIDDLRVLTNRNDWWSNDELSSYLTHLGKNHVIVLPFKSMVVRNDPDSNNYLCIMHMSVLEKDYKHWNLCHLVQIGPQDSEPVFNGWYNDKYRRKMAKSIGKSFVKLLANTMPDEKLELEINVVDKILISKTHAGRTVFNFKVVKSGNNYYVTNNAECSTNWKELNMSFKVPPHLTDQVSKLAECQLSALNCDELNMVFDLPALMPENCTSQLKGLAADIVKKFLTIKYQAMGLMQLDVQSWNRELTTMSKYSQDSVKLNRWNRKLKTGDMVLIKTQNALHMLPVIITPDGCCIMPMYFPNLKNAMHIEVWTPKMSINSLLKLLGAVVAANVDASHTIKLLQGATGYSGPGGCGKTQQLLAKCEPGDCLVARTRSAIDNIRARLNRNDVYCATYEHLCVFDVDPKRLLIDEATMFSWLDLHLIIGKNTQKLLMAGDTFQIGVVDMFWAGGTRHTQSVMAHCKNTVVMNTTYRYGATLCSLISPMVGEIASKSSEDTHVVLLDWEVYDAERLNRTYKEHGPGTIITFYNSALEKLKRDMPSAESSTVHTFQSQERDVIYVLQWNPTTSIGNIWLDRNYCISAATRARKKLIWISVSLGTGKTLAQRMTGVAETMQGGGQPADREGMTWKFCRWLTNQKKFEEDILAEELEEFFDCDSEEHEHTDDESVNVAHVQIEPKLTVEDVDLLTHIGTKKITLNDEIMILQPRTRQERIDKFKTTIAKNFGLRGEILNEEATKYKISDMTGWVFSATVELHKGGHMGSMKLIRGAAKYNDMYVNSILQDNRDYLVACKHEPVGEWISKYSAVLQQLLIAQLPAHIGTLVIRELEKRKELQSDSESIAQTSEHDVDITTNTEQTSVAPKDKWLRKPTKDSSGPMTGDENLSGKVENKLSDLLTTTNSQMKIVSFAGITQEYVISVAMQSGIDINTSCSKQTNGCIISINSGGVLMWRVSLTDNGHTVESQVVSCIPEWWETVQTEVMAINCEAVKVYQVSPNLLWKACDPITAKYWSNVLKENYQDDELDEPKSFTPLIGTSKIKKSKQKPQWEIKKNLKKFLRPDVIAGVNAMTSSREHFCCGTAGLADAEELHDNAVVRAALIRPTVDSEQCVRAIAEWCFFTQAGGTTVNFKAHNKVVTVVWKIQCTLCGQLEFYIGKTKLLVISGRPEMRRLRTVELFSKRNDAIVSEILSTVRMEEIIELWNLPKPSGFCSTVLIIPNVLLQDWYQMGMIVERCVFAALRRLKGRVKQIGVIYQEKYYIKQNEQHIEKIVKRLEIYGKCKYEGKLKGARPMENCMFTFSVNGVTVQAALLNDKLWISGSNLTRFPSSTLVTAKDLLLKCVAAEGERWQWWLGYCINKLIPETKYIGARTGFNLPFEYHMTNKTEMFKLLQEKNDEVIKRSAIKYHHIVFVSGEQYQHFRPEIEEDCYNMPVEKHGIDMYEKGFDSLAEQIMARFVYNGLPVGSKITLITEFPGVSLINSSWGMWCKPHSSHTSTRYTVNLMDCEHLLRKMQQVYSSKPDVVQSMTEETRKYYNDMLGCVNQQIEPKSNEPWFHRSGEIVNSTNSEYLMLGLATCRYNPEEIADCLKTHNMNRAWQIFPIPDSSNHINRHVKDGKIFITYSNCDHPLEINNETETLINLGKPYKMKTETLVWHRTAVVLGHALLIVTRLPSECQPPLCARPMVYDYRDNSVEFVVPVVNSPIVTTATSNLVDTKNIKIPFRLYKALSLRMLRPGTSLADLTSYARTYMHGASFTMSGTTSKLPKTVDTVMQACACVYYESTRLNESLQFMSTEWGSGQTAGWDKKGIYDSLKTVGLNILADVLTLLGNNVSTNDLLSLINKLLTVQADRFKIQTLEIHKLHKVVKVNEIILYSDGFDNQPKEYDLGEGFSMRELKANLNKLTRGYQMVNENANQLMSTGVGWACAPKTVETIVSKINTTKYDWEGLNCDDFITALDEQVDRVVGNHPKYDLVKRKLQEQLKFPLHRWDANLWPKSRFDGNAIKLAIEHKKSWMKASDNSMWRLNGLLKEMKHDYAAVRDWCGVRVVLSTIGTRGDVAPMVGVGQIISALGGHISIVCPADQVNLVGNSWDVIPLNIDTTKMVELLNDLLNSTTTLMSKLSLATELQTMLSTMLSTCDEKLSSAIRDSDLVLESPFSMICANLANKMNRPFLYCSSFPWQTMRVNKKNFVTTWISNITNYIVDSGYKKLLNSWLSSFCDCPTEGVIAGGQLLNLELNLVSNDINRPSNVISAMYTPMWNAELTDDDYACMSFLLCELSIVVTYGSMPESRVTERLEQLTNQIGDATVHILVLSRERCMIPRHTKNVKFKQCQKQVNLLMVCQCTDLLICHGGIGTLMSGIYGGCKLVIDPIMLDQLFWADWFANMGLAKLWKEGETLDIGSFINTTHTSNYTNLHHRMRMQHGVSFVATGFKLFLASGKVNCKASDCVSLEMYALNQETIGNHSRKTNWAEIAEMSVQFENDETTNFETRFKTSISRDFTIEEKRTFMDQVRMYRAQGDSIGKPFCKQTIGDNEQPKNVSHRISSQHGLHLPTVGRQENESVAGNESPEVIQKETSDNIDETNQQTDDVHEATTQSTTKTAETNNASDANQPEPEFSDKVEPNNLEKEFPTAEKPAAEPTADKSEQSEQTTRASLGLLEGAASEDELLNLMEAMMYEDVLNADSNNCALLDLILEGVLSGGVWASEKQIINDMISYVDNKLQSEAVLRRLNNSAKLVNAPLSLGFGKVTELGLPWYVCLTANVEVGDLVFSSKNTGDCVFECMEKFAQKNNLVWQSNVVSHMLGLNSWPTVQTVICIVAILGWDIAIKMDDLQMVVSKLDDDLIWGTPELALNITFNNNIGHCELRKCVSCKHQRLFVGSRMPLDETTMTNVRSNLWTIIESQFGKSEDESITLKPDYFNELNGDKLIHHFQIFMQGRDLEDWLAQLEFKQLRVQSLKNLGTLVYERLHEHGGFLWAMDVRNARDNGTVCLVWTRGGWRPFCVLQYNFKTILFPMGHNSVDLNENVVLHTSVRWIEFASVKRERKIVIKPPTGKTITALNVATKYGMLKKSTIGLCDSVADTTKDMLAIYQYDNRAHHKYDELNIIKAFKIENLLPIGWTMTSELYQELTVRDKSYRVVIDNGSVKILLEYQSVQCMSCMELWWHKKNVPTIKTSNSISASKQQLLRAFPDLNSMLKNFYGSEHGYIKCAPEAMDDQWHEVTKQKLQEWFDDDYDKVMANLGITDNCTIRIRAIKCDTGTVLTWDTAMSYTWVPLGNRKGMVRAIQCVLEFRVQQVAGELQSENVNWYHNELSDESVISQWWEQKKKQTNEFDMEKFKHTINTQAMGQGYNDYNETLTASTMPGSIVHDVATQELQLMHYVPAVGGPITWDFNDIHEDNITSDIVDMWEDLDFSDWNEKYAPANNVIIKSKLPATRLMLSQKTSLTEYPMYSRPVMTKAANQEFNAVTGRLCRVQEYRTKNYDMQLEMDCFLSTYGNKDAVSQIQDFQNNLIGFDEQAVLDWIKSRPDNNAIAEETERILMEGMHVNPINMVNVHLKLESLLKEEPATNLKQVKPRALVWQCKGYCAMFSHAFKQIKNRLKMVLNEKVVYADGLQADEVSNRLRLVVGDLWVLENDLAQQDRQTDHEILNFEMELYLKLGMLPLMVRIWRNVHNNWRYKSKTVSGMRDGMRLTGQATTALGNVITNLLVHRQLVQKLGNAVKLFLVLGDDGIMLTSVKPDTDRLRQYCKHYHNMLCKPNVTKNLGTFCCMMVYKLHTGNWEAGPNVVRLKRRFEVTNGCSEATLANHQARCMSYCMMLGNIPPVAQIINSNGWPIEPHEWYSTAECWAAAERLNGLEWGDAEAHINKLIDMMANFNPFDRKILHWTERWE

SEQ ID NO: 1301 - protein, 5011 aa, Pumpkin alphaendornavirus
MASSPITCSNPSTLYTVSRERPPFWRSLLKKLKLKMKYKDYKPIKKVVKPSVVKREFSNKLQGWIKLPRNCRMSLNKNPFQTSFRKVFKENKSLIFDKNKIKLVPAIRGVKKFRDTCGSVAANIRFEDPLAGVVNFEAMHPLDIARIYYNVISGGCEIWKPPHKPISDYLNHTKHEGIDDEEDEEEMFLDSNNLDNNLIVRIVGPGRGNCTSEMLEVLNKLVAKFGGYEAYYNVYLETQHRHFGYLQKEDNGKYSFINAKFNPLKKCSVCKYMNHYEEMIRGLRMVHYSLKHYRPKSKVVTDEFLTTYNVGDVIEDVPWRCGYCFSDLNLQVFVREDKLQQLIQIVTQHLFVLMGDIEQLLKMGYGDLYDDMDVASKEKLKSADQVIVNEYFYHLQRKIIPVGHDFDAAQSKTITEVLGGCFFKPQSKLNSVKPEFIAELSTLTELIEKSCASKQVASVGQILPGSSKENVHHWMHDSTWYSPDPAVFCCSEKVCGHKHNYIVYAGPGIYNRSLSNILALVDEQRTLQIITPIKTNQNTLADGTGAYQRTNEHLNLYLDGNPTPLKLKLDTYTIINNYQIIKLDDKLYYIMETQKLKLTKIMTVVGPFSDKVTYPQKLIKDDKGVKLRMYLPNIDSFMGDFRGLNYEEQEFELNVSLFRYLCLRNTSGKVSHDTLRSYAVGYSLRRFVVHSKVVSNPTIVYQDIDIHVILSRVCMMKLRNCYDISYGYSQFAKKLGPFRSWLGDVESAMTSSFLGLINKLVTDALGLDWNVVLNFIDDIRLQTLIDGISSTNFWEKLLAMAENINTEDVKVVDLDQGVDVFLGPNIGSCDHHKETCEHVGHTGNNRCLCCNMPITEFEFCDCCTPNKKEAGNFFDVEEAIKNESKAETELKKTNPARKDVLSQLVNEIEKLVSTKEAAKNGVEKSSHWKQTFKNVAEGIKQGVSNQINRVIESSVPPVEDTKQTQTANADEVKPTKTDEPPKTEEIPTSSEGWKRVTRRKYNDPQDMSDRMVVETLDKLQPLTVSSDSAEAIQILGYDFVRHCLNPLEYENILNDGTKTMYTMPHLPMGETVSQNRVFEVTTKIVIPNSDSMTCAYDAYKYGYATASLEEMIAINEGPPPLSTTVLTVYAKARRENLIIIGSTGTLQISRNSLTSNNYHCIWFDEPELGGVGHFMPAIIRRSSGDPFYFAHTLPGSLDERNQLMKLHYGPGTSMLTLPESFNGKENLLMELTFYNLHTYMSNNTSTSLLTIEKKDGRVFLTNNKDSKVHATNREKIHIEIPSHLCKFADKLQLALQFKLTAEDVPEMRHISDELPNNYEYEIEEEVNEILRSFIRVSNVQSGLDAKDIKFPYKGKLTSWYGRSKFLLLGGETHKMKRYDVLALKLDRKIELVYVLGTEGNSVILDKPVITSQEVTVYELKESIGSKIRLLVGLCQPHISIQSLKNKLSVAKYITGPAGYGKSTMIAQQAKAGDLCVAMTSTSVQALRQKCKKDVSVLSMERAIYDHCKTNGTLFIDEATMANWLHLGYLCGEDAQIMLYGADNQIGKKDMSATPGVRYNVTVKDFLKKENIIKEYHSYRIGEPMVNLLQPIEPGMTSKADHKTTYNITTLDDTEFENIKTIVTRANPDVIITPYSHNRNKIKALLGSLDVKVVTTHSFQGMEVNTALVVLREDINRSRELNGNPEYLNSALTRAKFHTDIVVYGQYGTITDLHPLLRRVGGMPNLKKLIAPSSSKIPIKDKGIIIDPDTGLPLEINIRNMHNLTQNMVDKLNDLSISNSGVTLNYEKLADGTRVVAKLGNSTVSTVTNKNGVIDVQANSFIKNKIMNNLDTNITIPVQKEKIDPNYNVIELINVSFRQTNKLRELAWMVDKGVGKTMEITLGGERIKVTKDSGCPLFSGATFECKDEKLKISNGWQSWTKRKLYFNKNIEYVRLSPIINWLELSHSELRHHKLKSIGWLDVMKGDTVHTLWQFQERLTQVHLWLLNFLTANANPKCYFNNVKNVSRYNKLARSLGLPPVSHHQSVVYHENFIVNTKFGWWRQNKYTLGNGDEIVAEVSSRDNEVVWRVFAMECLADMRHTYPKCQGISGTDFDIPGLHVPLHKHMAKNTAIHQLVCTNLAKIKEQIQPHTHDIVRMDKRGMALVKNYLNQKYPKMTLTTGSYELPNSPIEIALEQLMINMVGSLVKNSTNLVAYAGYVPLAVAILGKYYIKMAIPPLDEYGRFYYDMSKPQLDSMLDHFNSTRTKKVEWYIGTETRLERLLLGTRLSCMTPRKIDEALNQTKNVYGWLPMFRKSTDNYNYDHKNSLLSFKHGKLSNPLNPELFNCGLNGKPIFVNSKENYYLEMSTLTETFDHRLVQITKRQIPIERYIDRRIGSYSEMNNIIKIKVPWIDLDLLRVMSDRQILTIKELVINKKLLRNILLRLMTGEDSHDDALNYARTLESTQVITDKGIDDLSTTNLVVTLNTTWYAIYIHNDYLRKFQSLIYAVNSTQGRPLAVGLLEQLISGFSKLLGKVSMVAQDICEKYLTKLNSAINLTNKMADCIEEAKKTNWAPEMRNVYFNRFYFHDDDLGDINAWFKPGDDDDDNFDDDKNLKRQMMEDENDYFDSQVGSNIGRYRSILDKGKSPPTSNYEEPMNASTSKNQQCSKPSSDQQADDDETDFEDALSSHEDFNELIEGTPTSERITNEDVTFVISSDNTLYLEQKFEDLMCRKRILRYLEQLCQYKQMTQEEVKRSLDVLHAELNKNKEFNFDDYTVLVSAGLCQQDDFASPKYNVTPLNKIEIPTISKWEVKPIKYVRNNYHMIPKVIWTYWHSNVTSRVIKKCMDSIQHHNPDYEVIVITDKNIQVYLTIDNLPASTSRNLEAKSDWIRLNLLLKYGGIWVDASSIGISSFDDYLQEAIDSPTGVLQVSLNSREEPVKVYENWFVVAPPHNPLIKEWLRLFEEVLARNIVDLSALDAYLEDKFIEYSAVKVKLGDSKRFYLKCYLTETLVSRETGLKPVAVIEDDRRVDVHHDVKWEDWNKIALMYCLKHDGKMKVPMVKIIDIHRRNLEYYLKMGGVVEPESWLGQANNTANLVGVITDPELPSKIIELINSHYVKMCVDNKILAHKKSSVNKIHKQVIKILGDKVDVKITDSLSKIGNVLFELGLLLILNKYELQDLLSKIGELEDVNQMNEIRIVDFVEQTLNIKSRHRYKLVTSNLVQINRSNKYPSRPKYAERNGIKIPLIIWSYWDDTTVNQFQVDMIDNWHYHNQEYRIVIINKNSLSRMLSKSTYELIMSQTPQYRSDWVRLFVLQQIGGVWVDSTGIFQDSVHPLVLETLTHESGMYQVSIQPRTTSPRYYESWFIIATENNKLMKQWFDNLHEMTKHVHPSGSNALSWLEQNFGEYYNASKHLIVPNLRVYLRVCLIGVITCMQLGIEPLSICEDEGEVSMFHKLPRNKWLNFWKLLTEEPAEQCKVTFPFIKWIGMQRSIIFRNFNPMIKPRPGSLLDQQMYKIEIDYDITKAGEMVIPNKHSEALVAKPITISQYRQASTLIMCIGSGGDILQFITLYDILESIGMPPVIITHADHERSLGNRRKHLLSVTAESIMETVDTKLTKIDLSSDLRSMRQMKMMVKELEEITFNYAHFSKFIIINSAVPNLKCFSEIAEFKIIEISTFPVDWVFGDNTSDKGYSAGIRLKRWIFNMMSDRKKIHNFESRYSYYNSCSKLLYPEGDKFIGPLTLWGYKSTADYITFSDRDILVTFGSCDKTISVDHKLSLMDNLIAMGHSIIYHDPYRLCSIGTRMCDEVHKRQGKIIVIESFDLRKVIGSELIMLTHGGHGTVMEGLMAGFKLVIHPIIADQFQWAKRLRDLKLASIIYDISDREQCEVALIEVNRHIKYSEVLGSVQSIDTLRFLRTINPKALFYDPSVSLRALRGEGILDQQVTYKKGIYRIRNVAFSIKYNPVVVDKCVYESTKHQLTPEGELEFSMLRVLSSNKLKESAVTERDLIDGVLSMGLNIVIIYNNGSGVVHNVFNSKCLTYHIDRSCLPWHVSVPEVMSYQEGEVMNMLATPVRELPDDIITERDNWRSDFSVIELTNPRVLCLNQGKKKIENLTARLRGFMLNELGSRAEIHCCRLELRRHGYVHVGDYAAPDQPLSVGCITSDQGWMLVTWQVKNNQMIIYGEQGIYTYSVLVNLHIQVGIPKAPKAILSKTIELMSLNKTTKQHTIINNLNPRSSQIVSSYMQKYRLIVSDYDNRDHHMYDEMTLLKRASEIIFHSNRKVTLDDFIESHGAAYNRLTLKQGMAIFEHYFEDKDIGALVVGAHNRYDRDKGGFETANRLDDDTIAFIQHYFYNLNGRLIARDTWEINGVEILSYDEILPHTNSAIMFTLSEKENLRTVIKRHPHWEVARLTLAEFKKNPIIHVQTTDNGCIILQNYLIILRPPKLGGDSELERQWWRITHRKTESLPTPGNWWGMKVKESNKTKSNFNDVMAINELHYHEPTTLSIALSDDVEYQPPMDIYIAPYESVYPGSILEPLTDLPDTIAMQLWEDNDLTNWLNLYAPLNNCIIKSRELPGKIIKSEKLTMVKYPIRSRAVLTKVCFEEGRSIIGRMKSVAMIRTKTPNPYRLTLDIADTYFRPDWQQMINNYRQELLIIRPKDVKKWIEENKDCEKIERELIDLLCGELISKPINDVNVHLKLESLLKENFTIMTMQQQARIIVWQRKAVCAIYSNLFVEVKRRLKEVLHRKIVYADGLRPDEISARVRLVKNVAGFFENDLTKQDRQTDKPIIEVELMIYDLLGVHPNVIASWKEMHEVWRFKSNLYWGQGEGMRLTGQATTALGNCLTNLQVHQNFTKTNFRILQLGLFLGDDMCMVFSEKPDTSNLRKDIATNFNMQSKDSWVINGATFCSMVMTRTNFGAELAPDVVRLKFRYEVPNGVHEATPTNVLMRKASYLMMLGKGPNVDDTVKMLNLPIKPIAWYNFDHMVTAVAHKYNMNEEQVRGYYDQLLATIRSDNIYSHVFRHFSNK

SEQ ID NO: 1302 - protein, 5747 aa, Rhizoctonia cerealis alphaendornavirus 1
MQTNQNTTQNTISFNEQMRAIQARYNQIGITPASSSDNTLSGGKHDKLSHESEEPIGYLPTGVPYFKRHVGFGEHDESIAWIGDCELLLNARTYILNSEHKRNDPLCKKIVSNKTMEEFLKSSYPDLITKMKLFDESEHTFGTCFEILWVICPWIQLPYFKYCVSKDVTLSEIKTCNWLTTATYVTDKCWHKLFTQPPQDDRYPWTKEDWITKQQARTLSKDWPTQDQPLIQAQQITPGMWLITEGELTFEQVMDTLPTKARIGGKDSHMIDGNTVNTCWNSSTKELYAATQVTIDVAKTEPIEPNHTMSFVRDKDMNLKRRSRHFSDADANAQARLLKSYQSIRRNRKLKLHASEGDEDDDRFTIKTREIKVPEFTIKSKPKAPVVHEENCRCDPCLVALVTQHPDSSNWSAKELLEKQITMIKEIREAESKGTFNTYIEPKPEAPTAESKPKVQLMKPLTVGGKGGCWKWLPVKKPAVTSLNDPLAGQIVPGYEGLYYARELDGEAMPIKEIIAQMEKTIDPKFMIYKSIREMWERKDIKLSKTADGNLHVEKCRILYEGEKYQPGEPQPNCSVLSILPILKKLDDDNDKKMMAKLKDESNTTVTTPTSSQAAPTPVAVATPAPEPVGLFMRSDQNISNLLPLTDKTPGPKLVKNLLSQMALTTRQDLLPDNLKARYSIVNLQIAKSADKHVYLRQCRILQPGETYGPGEAKPNCSILSLIPLLKSLDDQRDKENLEEQMKHVKSTALLGTKELVEFVKKETSGEGAIQLGTTEWDIAIKSDLAKVRNILARTAAEVTKVNPGTEPKDLNRIEEALPQFHLVEKKGLANPHAMIAVTRKMIYKSLKNIYKGRPIIDVGGDPTQGADNVHTMRPNLDVHDGLRKITKKNELGCDHLLSECNCKFKPNSGLIFVDSIYDIQPKDVVKFCRENKIETFYYAISTHGIQVDKNLNALPFSSGTAIRDQESMVTFLTGESNPYLNSENLTQFWQNVDLIHDQHTGFRVHTISKVGMHVVRSCHLLTTDAAVYKELKIVSTKEPTLRVMVPTLKYNTIIGWKGASYTIVRQPLDLNVNFFNQLCDRNINGRVGLDTLTEYGLAIAHSKYSMHDKTITNYDITARDIRLTSYLAMMYMSRVNYGLTEYADASYTLGSFQQISWSTVILGAQMLNSWAPRILEKLGGETFAKMADKLLSNGSIKMDDDAFKGIWDQLDNVKHITKTQSLKIMPNYESVKSSFICQHHSGLCQHTGDDKCTCCGADATGEFCTCCKSAGHAHACGHICMIGHGDGYIKCLCCKNLGSANPCANCKEVRVGLVDDLVQILTTTPSHQVTKTAYAKPHIASEIIDYFGNQVYSKRPEGTMDLGQNWHRHSCVKCGGVYEHQHKFKNIQHYQHANECPHCNENSKAVKKNYVSVKSVDAGHLDTGKPIHYHQCLCGKPIACNSSTAAHTEKCSECKAKSLQKDNKPSRSYAQALDTKPAQTEQQPSQSMIKPASIHEDEHVHRCPNCGNDYAHSHPYENIVHEHPNCQMCAVDAEQVSPGASLSFKLLEIFDSEFVKILYEGWSTHWESKTTVDAPFGPGRTKVHYPCHGLNTYPAGSFLVRSRVEVSNDDKMCGLYALSIVFNGVSHQELKDVTKVHDTWSMIEMLQFAEHTGKSLLVITDEICMAYVSPNDEDVIPSILHVFDDEHPSGHWEPCSAVQVGASSVWPCPDKMYSMHSLALDNNTDVQNMPNFDTLTMEERVEYLKPLITSLEQIKELGANKMEDWKLTTRNKITYMTNNAGNQHDPHLGKFNWLVPDQYIRMHQDALSRMKTKLPTNLSIVSVDALSVNDLPQALDAELRLCLAAFNSIVGPSATSAKGIWVSAEITARNSISLVGITGTKLMPGDVIILKDNQYSYSRTILNIQATHIVVAKIPTVKRNLQVLLPKVSIASLAIRIVGILTCTWTSDKLAEVLRNAITYDGVPGAGKSTFIKSKFKSGDIACATTGGAIQSIRDKGIKSAMSIERLTYTRPQCKTLFIDEASSLSLASFAICLPESVESVHLLGDLDQVVYVDMYETFGTRKQALVMQLAGTTVPMYKSYRIGNPLAAELKYIKPAFEPAAHETKVTLLNVASFDSLDIQKLVTDYEVDMIWVFYDAMQKALKKVVTIPINKVHADQGKEASCVLVIQGTNRSDGTGSIHLDRNYCYSAASRAKDHLVWVSLNCYEQTHTLHDRIMGRHSLTRGKGKYLDQTKKIDGKLAIDELRIHASSDVIRLYNDTLKPYILIRAESFVNAGKIVALESEDLNDTIGYATCNGYQIAIYYPLKNFGIEHIIGTKRVVSVGPNSEEYLWFSAKVEQRVSDNIDNLIALILEWNLDEDKPVRAMQQLIRGNIDEMIQETGLTGWMVTTPDNTVKVRDANMEVIYTVILSEDGIDFLSNDTNEPPQLDMSFLANYMITPNHFVVESETISTKSILPPDGGVEIIQKIKKIYTVDLTIEEDVGYRTTLYRLHATKKVLFKRLEVATALVELNHEKGTLRIVSLDLSKLAKAILPMKVDMAQINSDIANRRVSVLTKEVVDKLLKLDESPTVTAPPSPLLTLNPWTVEDSAPIQPDKGKQKMEDITPSEESTTEEKQEGDSAENTKQSLESIAFHINKQSNIRFADEWSDNIRMWISEQSLTGVGAFTSVCNSLLDANTFSPSNVDTWASLSKTWDHLERRYSATDIQYIIELIDGENLCTILIDRNHVTDSIIVYTDEWKQSVIEMVAELCHCANMLSDDEVLATWPAQERGPVPLDSTPTDTPEADVKGEEVSDQGDNAWLRMAEAEPERHAKFAAIGLFARWSITQALSTISINNMYENHTKYTYTLEGELKEPAGIVWTDWPEAKRNLEMIRKLHNSKPATVQRAMVDIRHGCNCCEQPEMVDIHAPTNDVIYLTQRTVNIVRSISALFWPLSNTTQEVEFNVKGTSYSVSATSGCSACTGLTFKKDHQVIAVISSQYRNWMHRKVSYLGKDGMLMLTICGINLYPRHIDYNNPLTNEWHTIQETLKEYESDELDPEQITTTTGFKLYNFKRACCVLSERMSVFIAAVLLQPTGLKALSDATQFPLVMKIYEEVGRLRDQELQHALAFFNLTSDNEMKLYRVREFDVRNMSNGIESGIGFAIDKTVLTDLKDIDGKPYNKSLNGWKVETVSSLAVVGAATQSLLEWLEGGPVGKTLSLVGQTDMAEPWTQKYVKFLNDNWQTAAIENSKDVIFDAQDEFDSKETLSKKQVGPTISERMDALFGESDSFERAGAIGPVTGSLTIPWELHREHKTSVWNHFIKKAAKIELASHDLSSLPLYLPIGHIKVFKNVDAYQANLLDLQEQNTSLLSRSMEVTINTIGAKWVRQTIGNNLVYSHTNQPQATMLNSYFEWIHVKPANLLDGDEWENEIQQIRPVLRDIGEMMEKTGNTTDHAKSRAQWFTDNARGVGTWYTRSPLKGTINYYGTTGLAMPPIKFLAQQETESVAYMLCPGKYISRELGSWLDGDAPHFGYAFGERARPINQTWIDWIKRGDPKTDGSRVHYLRVKGNVLGHHILEIFTTYKKYSGPYYHMNLWEGNTEETVTYTMPVVNLALHDLSTKGLFSNPQVTMPAKIHRLLELRMCRPATSFDDLLQYLRTLRYTTYFSSTSKFAKVDGWTQTSLRWAMCVYLDSSVLAQQVKGMAQLKPETGLSGNTMINMAVDRASDFIKGTVADLTKHLNLNLSFEEFIDQIAEATKGTGKVGDALGAFSKMVHATSVRKDQYKPEIYKYTHANDVSLKYIKVTNPLETVKTQLDDLKPQAKPRTVDVLTKVHKSADILMGKKLVKVVYINTGTEGDKSINASVILSETDEEIILTEDIVPELAMDWGKQAVLAKIPNGKVTAFLNQVRRTNELKNSKVLMNALSEASYVVCNAMDGSVRYLASAAGVKCVLVSGIPWDNESLKNYDIAGVPQGAYNYIPVSMDEVVVRSFIPIDEQLSYKYEAQEVNQIMPRFTKTCLNVKAIEAACHQPVGKPIETDIWVYTGPVAVSDETKERINALARKNQMTVIYQEAGKERINVQQSKIKLAIVHGGANTLNDLLISQTPFALIQMIMDQLLVAKANPKLTFDRLETLGLTEYLEQFDHDLFQLTTPWTPNGVVLQAGINEDQWEINDLLTMAMGEDFEITGGKNNKRSVTENMVKEPFKLALTQHDSVSLLQSTLKNVLKHLPTTGIRYCVIYGDSEYPANLKADYGIVVHFYDETKPESTDTVTTYVGPLRGYAKLVATWHFVRLQAQFKRLGPSECHFEHRWMLLNYTNFDQPSESEIVNGNKAVGKLTSLTLTDPFDEKTYLLYARKFGIDNAAQLLLLTPGNCMKAMHACSEEAFKHWPNVQRLTTSDTQGSILQWTHNIMRDSRLEQDINRGDDDDDDDTEGDQDDQPDPRDDSDSDGNAEPEDEHYDSDEGRDSFHTASIHSDSGMERKEAHDMYESDDSIVEHADNEPDIYVGDEEGQTSRVDSTAERQSSELPTNIERPRTGDEPQTMQVMDDDLSKTQSSGLPPQDQQHNENEEGTELSHQQGFDKPYEEELVEITCRKIIGKFTIEDRLLNTTGTCLMDALKLQISWLRFDPPMEYANTAQLVEFCEDNIINCAVLNIETKEKFYSDEEINLEGYKYTIEPTSSTAWLGIYKLDGTTHIVPLYCIESRDQQVAETRLQTFPVFDPIECKNSEATGYWTPNINDQLCEGHIHYQPLQELDSHLGIRPSDPNMRKLFDRPNEYTVASITRKNWKLIKKTMREPYTMRVMQRVNLGCFSPSYTQEMTLNRIASWRLYFAITSEGLVPMISIPQKVGVFFYMGRDPPPTVSSVIVDGRANLMIRPQKSVTVRGQMPDVRYWDFKAAKFVKAEGKIVTGPGACKTMIIHDYDNLDHHGRSDREWFNLADPAMLKFTTKWIDNEIIQAIKVNKLTPRIHIKDNNVCFNILVAMNRAANIEQFFKMFKITTRVSRKDRRIKEVNIHTENKQSYSFVMRNISHLAYDEHGVAELHLALGQLITSETAWEHCASEYMATLEHSPTYIVMAVKPNQPHCNKNLVSLRKPHKGEGVIKEEAREQINWFREGDKPKYDRMMPVYTKLIKTYGPDYILYLCSGGGKSTMSRLTDKVYDCDRSVKVPAIPDPEAVNMGFWADRNAVVRKQLLDDGLKMVGKVLLVWHPNCVPHEWRNLPQLLVIIDDIAGERLFKMGNQSLKDYAADHPSMPSVVCTRNRTYDIMVKHFNIYSKNSAAIAMSNMTMEEISPINKYSTADKVSTKYFIPYIPADRMQSRTTEGYASIEDEADTDVINMFTNRDLSDWLVRVSPTSNLVIKSHEQPGQLKEMNKTTLVRYPVMSRPVLTKAVFQTYNAVSTRLGSVTTYRKVKLQPAMEMKKIAQAYFHDNWQHTVNKFNENMITYNAEAITQWLREHPGTDKIQKEVDEILAEGFLTNPLNKLNVHNKLESLLKEEPITKVQDQKVRIIVWQRKGYAAIFSPVFIEAKKRLKTLLRKDVIYADGYTPQELSARLRTVTGSTRFFESDMAKQDRQTDQETLDVEFEVYKNLGVHPRLLSVWRSVHRNWRFKNAHMSGNLDGMRMTGQATTAIGNVIVNMAVHADLVINNRDKIQLILLLGDDNLMLCSTFLDLQKFRKDTKERYNMEVKPDSNSTHGTFIQLIAYHTPEGTCELAPDWIRLTRRFEVTNGVSEATDENLEARCMSYCMMLGNLPEVQSLVQA

SEQ ID NO: 1303 - protein, 5540 aa, Rhizoctonia solani alphaendornavirus 1
MSHNSNINGQSPYNGRDFEPTQNSDRELYEGRKKQSIRKDAKMDIDRRALQLLSFNSIKRKTVTAVGNIFPISGHHRRGSENSGAIIEAYKKIDTARSNRGTLMLNRKPIDKDTVIKSKVGGDGDCWKKIFGGVTEDMLENKKLPLRTICETISYGLVPYSLFPCILVGDECWGRMQHTHWDDDRSDWFKQLPTEVQQDKMLVAKRFGREYGIKFSIVGQDLHVEEVGVNLTGCVISFYDMSVLKLQPLVDLCNASGISLDNDDDPAKLAKVAKTEQCAEQGSTVTQTTLGDTVSLNELMLGGRGDCWLKLAKYSIAFTFGEKFAAGQDVDSDDSDSDTEDSEDDTEPFEQQPKPEEEIKPRNFYDCMRLLLLYGVDYDETEELDWRGNKKRKQFNLKERSEQYKLKIYPTPGKPNELHLEDFGTDLTGDDVYTLKDMWAFCKLDEQSPKILAALQECIDKPSVSTYEDRQKAFSGTQKPPQQRIRIVDRLLGGESDCWSALYEAAGYDTFPDAEWVENFDGSICYSKPKEIPDKPVTLLEFLNMIRAVQQLGDYEHIACHILKTGDSYHLENLHLLSEEDEWDDETMDVPEGWIWTCASWSNCKIQSHKMFRDIIENRCDKNIDWLIDPENYPEYEEFERPTVADMMNKVLKPEKEQPAVKLQDLLLGTKAIDDFLKNNGLSGSSAINVGTDEWKEAMEHDIVKVRSILSRTRNNIFRGSAGLNDEDIKILEKDMPSSVVLTHKSVPNQHALFASSRKACSQVMVELAAGNKVIDVGGDPTQHRRALSDVHVLRPMLNSQDLVRHLNKPLPDNPKVSQCSHTLAACSCDWSQSIPIFVDSIYDISPMEVLNTMHSRSIDTFYYCHSFRNTDLNAGKGMTSMGLGIYKTFEDDLVTALPGESVSYVNSQKYAELWVNANVIVHQQIWRVYDICNIGTHTVRAVVKTNETASIYKDMKKTQMRDTITLRVPILDVHAVSRLKWVDANLDSKLLGSLLDRNMNANLSFNTLLEFAHAIALTKISTHDRTFDLMRVDAESCRLTAWVAYLYAKRRTGWLNEIVLNTEFKNKPKYFFQALLNLGVPILQEWVKDNKLFENTEFVNIAQSLINNSILKTDDPNLNILFDNIDDLVHTAVIKPFDIRFLDRLADWKCAHDLKSDSNGTNNCQCCGRACNQSYCIDCDEHYETIRKMEVPELRQQIDQEIMETIIAQLSVTDFEKPTESVTHIREKQREPKDKKEQQSEQAQMDKTKANSAAVDKELSAFVEDKKKYSAAVTDTQRKKPTNHNELKVMANGSHIHKCNNCGNYFLEKNLTCNANNIPSRNDCPSCNELSQHIVVDENYFENPPTSFGTEPKQVQPKPEYSKEILEYGELLGHDYTQYLLEELVEYQTTVVPHRGGYKTELPHMPMGRSVYPNLSQIRTQDETILYNNDENCGFYAIKKLMPLASLPSMRAITGRDGNFTALDLITTAASMSENLLVITENYLYVNTDNTGPHHTILHDKNGEGHWNVCSGILVSREAMIPVPKLALTQQEMTSYDIEFSWELNARERWEALKPIMASIVADALVAVDVDPGVQLRTINDAQTLSNNKKQRHEKHKGMFSIKINDKDLIDTLSKLNEPTRETLSSDLLTVVDLPEAEAESLRYLRDTRIKLLVGNYIKAMNDTNVKWQNVKVEKSINVSRVKINYHKIKPCDNVLIQLPTGTVQRTVLRSAKHYIVVRTLGFVGSCKMYIPKQSIASILFEIEALNMLDVNRNIVEQMKRICHSHIGTFGSGKSTEMVARSKEKDVSTYAYTTGALNSLNEKGIKGGAMSVEKAKFDFKRQKIVQIDEATGMTLLDVAMVTDNRTEELHLYGDLKQIGLTDMNYAVGYRHYIQAMVYHKDKTENYKTLRTGEPLASIIKQIEPKLIPADHKTDYKIISLNEFDVQKLDEIISSHNIDTIFFFYDADLTQFRTHTNLDSGSLKLCKVHSNQGADGNNVMVVQNPRVKTKDAIHLKPEYLYTAVTRSKKITVWVTINLYTQNIKLEQILRNDVEIFPSAGKRYEHEDVLTEIDKKITATIQPQSGMTAVEKMLAHIGMMSVLDLMNPVAVYPKIDWPNCVLLVTGKTLDDEDEICAALSIMLLYDYTDSSSNSRALNNILIKPGGLNSHVAVEKVDGRMKKNVNNNIKRLLKGYMPALERLDKLISAIAIEEGLAQNSLELQLHMNKIYPITLAIPAMSLTHKLCIILDKQTRGIYYTRRLGLDSLVVVDNKQDICQVKVTSVTVKRHQLTNIDAVEFLNKAADEFSGYGVVHSDTTSISYINQEETLFCDNTADVLSVSTNFYVIHDNKVWTVTEENIEYKLININAAIKRQVHEHVDLTLVECITSISSFTDVVSNDELQLTGKIKSVADLADPILQAEVLAKKYKLNCRAETTVEGHKITMYAGYGILSVTVACCEFSADWQLKEITLGNGLAIITKSIGFDLTKDVEQLASLIKGDLKLSKIEKKVRGGLANTLNNEGDEDSEYDTASEGDDDEDTIVPNNRTPIATFFELPDTLMTTNEKTEEKDGKTAANVDDLIDELLPSRQTYSWARTIARKLNLEPTGQSSANTREHTSAPLRRANFYAVAVSELLLETFGRLKGQEDAKIMAKYVDTEEGIKVLSMAKQMTFDSQIPYINSQTTPFMNIEFLTRSAIFGSKGEASRHRPVSEVGSLVLRDIHQRSIKLNKLEAMTDSLVTSWVTGINFKVLSLHGGLLIGLYAPDWKTKGLMRNVAYRTHPITQAWRVMPLYVETHYGGHTFKMTVKKGCSMCTDFVIYDDNQVMLVSISAMYRKPHTRKVTINCNSPLAPLACELLHIHVPFSNINHGNPLTGDFNDVRPEKLLDQYGQNLFSELAHWAVLYDRLAAMTASWGKLLLLALTGKEVSNALQDDHGFTTMTYYREHNKKKYDQVAALGFASGLAMTDLRRDAVSFVDINSWVVSYNTVSDGNGFLHVDAEGLVTLAAMPGSKNVKNKIEQVGYKVNMIKPHDMMGFTSELERQRFYNMTPALLRKVFLKIYKGFGVTPFDDLIIPFDTHRSLQTTVYKHVAKYASRLTIAEIKNKKKITYIPVDTLDIVHKSEPTLAYNMNLEEHGDTVMSKDCLTLVDTIGLEIVGKMTHEKFKVHGSSLTAMVSTSRLKHRIQSDYGPFNRDRVREESIRVRPYIKKLSELLATNSKSETQEFAQWLGEQLKDNRPSWLNNDHGMAAVNYVSPSVLEKDLSTVDWPMNTVAYMMVPFVGTFPTHCLMHENGEWRLSYTQLGTSISVAHNNVNIINRMKVSEDTCMRIVGVHLNHYLLEIVTTKLEKKFLNYISDPNRQRGKYITYTMPKLDLSMTKWLKADAMELITLKVPANVDRLLTIRAQRPDCTWEDQKQYARTLKQTTVYNKSSTKDLYKSTSDEMLYWAAVTFIHTKVQLNNIHEISESKLADKNRAMGLASSLYHRVKDILSALFMEVTSRLHVDQSWLDVIKNIVETYEEVEGDTKIGDMLRIVKKFQVKKTEKVYEIWKLDQQSTWYTEGFKDKLVPDKPARLQASRDARSVIKASRYVNLCGKSKINVVAHGDALQCVMLKALALDKQYEYIEIQRKTHLAQHSETMYQDQMSRIKTEVLQKAITSYTQLENIDADRVICLSDDLGTIFRCLTKGIEVKLIDNMKDDKIHNTLADLLYMTQPISDEVIKQIMSNLIGVGKAVGVYDAYENLKPGELKMSTEADIGENDIVLHSNVLTKLATEAFEQEMISPEVAMVGIGGAHANQRHVRRLIDIYGYDESFKWLKSHDKLHIEVAGYVIRNKSVVLHDFSYWMHKYLLGIRATQLYIHVGSHKDVADFYSTAGLNSTTDIERVKNEQLQSMLDAELSLGPEITAEEDDMVTVINNSWNMVKNKRSVLITHHTTTYPAECIITPFELSKDVGVVVTGEERIMHIMVLVIITIYHSRAEMFYNNTFNETEQWMKLIEADQRKPWVTVILDSRGYLLFIHKRPFKLGNKVEPAEHLPMVMDMFDNGPVAMFSGSTPTIKYSSAVPVDPIDFSGLIAKHSPRSSSGEKQSRTDEESDSEDDSDGEDFKGSKPLKPKPHQTNEETQPDETDDANDAAYEGADESRDALEESETRAARQQAVAEDNSTAQHLKLNKNTYPTLLNSKLRTYIVKQEDITYDPGATECGPKVLEKLGVVLESQETGLSPSDFAANMLSSHKNVHYVELGKLYTTNVYDIGDTVSAPGLIDAFSLHWVIANWSITGIEEPTRMATYDTLATGQCTNNKQQVFIIKNYFENQCENHTHSNLLTAYKAYLTTGIPMSKIFARNKDEFTALMTKHSTLEHRLSGQYQPGKVVDLTATLDGFITHEPVTSVHRGVLIVTRAGLVRAITALGDNNTQSYVIKPDDMHLAHSGMAIVIDARADLKLSGKGNKKKKITSEVMPGSFLRRGYLNVETIKQLRLPRGTALFEQGAFNNLMIAHFDNYSHHSVGDRRMEKQIIVDAIESGVFVECSEEWFEVELFVMEFYFMKFEMIHGTIFVSVIPHPFTYKAAEEMNAEIHDDGEMIKIALNSRKYDIFKNVLNDCFSLNIETCIEEFRQGLAWDDLHVWMKELLPLRQKYGVTTYDKFSGNPMACKFPIILDTYAAAGEFMPEYRTTVVSTLSLSEIEELDYNADVTGLNFDDEHAVVDSSSDFEPGFKVIGGRYENGKGHIPLTNQVALQNLSKVNRNLQTLITEIKLYTPITMKHINMILTELDVMPKHPNSEDANYAMTFLDHDERSCYLHITSLGTCVRELNPAGKRKEDFTVEVEHSEHSQLQKLLEDDRIGWYMDEGTRNQDMLIRQTKAKPLYIVCLCSGGGKSTICNLDDRFADPDKYVILQLLPSDLQNMTERDWVVRNDAGKRQLYSAGNQLAGKVLMVWHPDNIPDQWRDVPMLVVIIDDVSGKRMFNVNNDSLKAYVAKHPKTKNVTLTRPEVYQHLLTTIFPTVERNKQELINIDVFNALQLVDVENNNLSYDERALTKWMVPFVNATGTTVEQTEGVVAKPEDTDIMSIDFFNTPDHTDWFDIKLPKTGMKIKSKEVFGEFVIERKSTLTKWPKFSRPVMTKPIFSTLNSVTSRYGELTVYRKKELNAKEHLRKMVQVYFHGLANSMIEKFKAKPIKIDGKKTMDWLNARKDREKVATDLLEILSEGVGIHKVNAINIHAKLESLLKQDPIQKPEEQKVRLIAWQRYGLAAIYSPVFLEAKKRLKMLLREEIIYADGYTANELSARLRSVRNVERFFESDMAKQDRQTDHETLRLEFEMYKILGVHTDVLSSWQAVHKNWRWKSKLHSGYSDAMRLTGQATTALGNVIVNMAVHTDLIWTNYSKVFLVLMLGDDNMFLTNAWLDLQKFKRDTQELFNMEVVPDSHPDYGTFIQLIAYKTPEGGCELAPDWIRLSRRFEVTNGVSESNDENLKARAMSYAMMLGALPEVMTLVAEQNWPIQPFQWYEPAQAKLAIAEKHSVSIATVEQFLAHLINMMRYREVTEYNWKVPAALSGNKKKFNK

SEQ ID NO: 1304 - protein, 5262 aa, Rhizoctonia solani alphaendornavirus 2
MKRVNFICTHTQTPEPASSSGVLINNANQRCSAQNPSVVKVSTKFSKIRNNSKQQALYQSYLSIDQNRKDRGKMRLHCSKVFETQEQVPETTESPDLTFLDRKIGGDSTCWHKILTNYNPTDEQAEDFFLHIINDSSFGTNEPLSLRQIYEQYTAQTGPISKQKDWDAEYCNIWMHITEMDKEVMHLHEVYKTPLVPTAPVNKNEVIMNMAQLVLYFNPNNRFKNTMQAKPLEMEKKEKAVRKGIDTRHGREGSRDSVNKVLCNVGEKKVGVLSGTKSYLLKNNFFSNMEYALDNEGGSRYRDMVDNHDTRIVNNHYAKSNYELVKTTMPSKRLIGGNYEDMDHTQFVAVDTSVQSEDKQFLTDVSTVYAYNNCAADKTTVYGECALTLGKQPWYSLNTNLNNKNLITTEFDIGTFFDYELIYFICPVVGVDTDGKLAKEGGSYAYYNNMLLVTYGSSSVVHSYSKNVANIMSGSNHLNEGEHSLTVLARKRFDFMQVIVLTPAKLEIMQLTENDEAWFEVPVIAPTLFGAIGVPDITMKRYKLNKPALNRLINKNLTGKVSYELMMEYAMAMSWYSYNKRGVELASEKFSAEELKVHVYVSRVLVTLQKLNDQIENLIYNDGPNKLLIAAFDAMTSVAMELTDADSPRSTVVRKFINAIENPIVRAGVGAKMKVWMSLDAWTMSRHIEVSTYDQPSACNHHQECLEPYTGITCLHCGYNTALNDSIWCRCCSVTLNECYHVCEFEHSGDNVCTCCHKNHSNEGEWCDCCLRKYPIQEEVEAVDPVKTIKSVVRERKKASKPVNEIEAPKENNAKPEPHKQKEAEKLPFTLDLSYAQLRQSLPEHSLNLFMGRSEIGKRYTNDEKLSLIPFVTNRHPLALLEKYELYDVNDVTVVDCGVDCCKFYLGLEFSEYRLKAVTGGKTRGLSADQIGKMLNDAALNACVIDASGLKFFRCNDGEQFACVVHTSALKDAEYKNHWLVCKVNLISADKNEMFLSNMNTVVDHNNAAVQLFRKYYNSLNDDEKLFCCYTLASKSQASIVSGFNKFEFTKERLMNSDEHDPSKGLYNYTVQSRLAKYATMLVDSMSGSINDELNQIWDINDDNCLDVLYNTECGFRDCCYKIALILSNPVGHCRTVKKLVKRSGMRVYIEVDDVRLKNGDLVFFKQGVQYKPTFVKVVAGKIDVVLTDKQSYSYIDLLIPKASVSSLLMRMYSYNEVKVDKDKLIQLYKTGKFVIGPGGSGKSTSIATWRKEEPTVSATFVAMTTGGKTSLQLKLPIDDNPQSFEKASISHINTQLVVVDEATLIRPWELALVVGPMTQKIMLAGDPTQISVIDLYASGGTRISFNAVNYAKKYSDVLTLTSTYRIGSTLVNELKLHKAMSDLNSLASHDTTFDCLWMEKFTPNEINKLAVGCNVILVFYGDQIALVNNALDFRSVKTVTTVHRYQGLESDVVMVLQMPLSRQADTHRQFGHCISAATRPVKHLKWVTIADFSSETPLHDRLGGDIGSLEYQVIEGIELHDEVHSALNSGVAKVDIKKFNPEFFTATVTEHTKLVNVSYDIDDDKVQINLKALFHTATYVVDSGGRVSTNVPDEYVKVVEDLFIKSCNVECDYVVKKKEKYISIAGSDAWILRIVAFVIKVYTANNLTYSVEHNGEKFNLQVKPSECAACGEIKVYKGDELIGGVTRDYVSLSGRLAWGESAEMVKDMLILNKGGLPDYIIDPQLSHAILTERVSTALKDFNTAVSSSFTRFLWYNKYENSLLFEEIKNTIGAKITVTNCDNMSLYPYFRKTLTGWKISKIGNNNSRIVVTRSKAKKLEAIYECLLILHERYKDDKTARYVSRFYMSAIGARNDEDRIPGMMESFDWHKSNKTATYRDLVNRQDMVKMKSVKYMPQMTYVPKNVFTFCSKFTNLDMFASNKRMTTSDPLVSAADMTLARLIRDTYPSCTVNFINHTIYTSYVLDFGLTSPSKATGEVAHTLNQDLYHNMLTNHAGHVKVDDPMYSTLLNEVEKGGKYTGLHTKPDVIVTDPTILNIDNQILLDWVYNASVVYFWVPLECHNINNTLIYAHKDSNTPFECKKEWHDAIEKGFSLNFDDVKLGVKVHTLKTFDAIRVCMIQREEVGLWAEPWLTNARYVNIMVPSFIFDLESVVSRGALLEMQLATINIDTLENLRRRLLKPDTTFDDLLVQARTLLNTTQYTTSMVRGKYEEKVHEMYRTAKIAWAIHNTENKMFSLLVDPSSIFDLLCMLPAVAAAKFIDKFKSVVSPYVSSVKAMIDTYEKKSDILKVLSKFVNSLEKLKPLQLAPTKTIVNSANQMLTRESRWVPKIKLYITKRIGLTEISWDDNCPTCDATMIGVLNNHFIKSLSKYHTMVHSSDCERAAGKTIGFEDTCDIKVVTPLLGRHGLLIRPSDLDLVKGKNIGIDTVKPKLYVNCKLILTEVNIVTKISVAYSKNCMIKIVNDVDTSELFTSTGGGSVLITEDNQRLSASTVFDVSSQDAWINSCGLSYNTRGWNVTMGEILSYNRFKLGRQLEPMELINTIDAIDSGYLTSLGFVSNGKLLQKLSNCDASVVLGEAYVDVDTGYLISDIAAYSGVRIDLSSNYAKSARESIYGRQFAKLDCLEFDFVEDMQVETKFKFKNGYDYECLNEPQHVVSSTSVLLMNRTCECGSNVIVTGGPIHPRDVKLAILSHTTSYDKGVYHLNLDTLITDKYLSVKIDRPIDTVSVTSSLDTNLEDVSAQNEDHSKDEVLNSEEVTKWFDTCDENGIKPLAKMSDLRTEYVIYTSDGTFPINDEDMLASMSATVTKTRVSAYHDSTKDEWVYRNVNVYEVDNSIKHPFEDLPKVDYVAKDLELAECLGGEMNDVVGRYKKEAEEMKVHASSCDDDNCKYKNSKGKHLFSSCDENCLTHHSIECEMKREVRASSKLLDDNGGAGTKIIADLAHKEGVLLGRHMVNTPCVRDVNTFTTDDDKSMIETMLTSVRMKLIDVANTQALEIEGTIAGDPQYSLRNMDDSKVYDYKFRFVHLYSAEADATAESHEAGKRLIEFNINLPEHKRKRDESYKYNLMAYRKNNVFEEINVPEHAQRVWVSEPAVGDFSDVEMNKSRILSKPSYYKRLNLDGKIMDRKYYYESTNFKKVLFKVLDVVDRTNNLCVNILKARQMRESPKDRLSNRLIQAETARPQLEVGLVYNSAVEVKSTSGTTIPSKDQWVLHLKDWHWLRNSSLNWDERYSIEINCRHWTLGEMLDYLYYDEKGPVINKMKGTSYQWLNHINALYCKPWTSVEVPETTNKWTKKSNGKFYDQTGPLHAELFTIPLSALWPKGTFLRVEGMKFSRDTLKLVDYGARYNAWCLLHMIATMTKNIWIPISAPSDFVTAMPVIRGMNCCSDTQPYDYSKQEPNRPMNPEHVLKNLPKKQRTSWSPEMCTLRSVYIQIAVSRDGDWSYGLCQNAYNNFRPYIAAAKHGLEQKLITPSLPLVRAIPHLPNWSGHTLTWPGTYDKSWQLGGAPFSPNTGAVVLPPNTKINYPITQEMAKRAGYLHVSDAESSLNEYYQVVKEKSKGHFDTRRAHRHTPWSERFPCGHTKSNMFNKCRHDVLPLMFSDYQDQKGLDIEPMVNDSTELIVALNYNGRKFDGTEVSWFETYMGFNLNKANGLNTLLIMERQDSESRSRNVKGKNDSTDDNDEESEDNGEEFGEKGQEDDAYDTANEDNDSLDGESDKTEQPRKTSEEQESVLSPSAQTYVEAMRQRLNDLFPNKRAMGSLGEWLPINEFEQRIEHNAQTTGLKLTGRDEIDFFIKLIGNDTKKSDLDVMLDIELRKFVDKPEKYTYNPLLGGRNNKRLALGRDLLEMENCHSVSKIYNNCPKLAEAHYDFLKNLQSKVDGLNIQEHELVHWYSLCPGIAMRSPAKLPGRHIHIGISDRKITDLGFETLELGSDPGRFGACLRVICALLANVQCTHFFHSGRPNLHVLFAEMVIGEILDDITVNTVVAPFSTCGPFLDGMVLVDTFKAKDAARYISQNIWYREIYGIDEKEFTIFGIKECWYLGDSGAWYSNMNVNKLYKSWAKGINMHLISGQIRGKFPYGMDKVIQASSGKTDQKLVNKLDPNTLKEETRGKEPLITTTKTDSHIDKTIQQVQVEVDESMSEIVPVIGGVDFHNILFGEPNSNTSLEEYKFTDNKVMETLHNPQVTRDCPFKAIEWALKYVVKLKFTSTVLRSVLKFKDFMNDDEIISRLKLIGHSFTYSGSSKSVMFSCKNNLGEVEKPFNLYVTSDQIGRTHLTVVKMAYRALPLNKEWSTFEPLAEKMNPIEPTESTLMEMEAMMMGVLPATGPMKEQLQNVNFRMNGNVARIMERSESVIETRASRAEGKWLWVSNLSPGKVYLFQNKLNRFEPRIVMNSQTGTFIRGGVDQRVAIDMGTRLWSTGNEMSRTIRSEASIGFLNAASKIFANDIAHELAAWPIDREANLILFSDFDNRNHHHADDADLLRRTRVGNIRIICRKEDNMTWGVKMLEALYKSGPVRLAVRQGIPYITCLVKTPWIQKLYEGLDEQSILYEDMVEMVTKFDKVNLEKSGNDFMPVVQRLFSKFKRKYNFGGPGQPITHKLTGAELTKDLMSFGAGDHKFKIEEFTHYELSVERNTTPVYLSGWIDNEHYDPKSWSHMVVSAVGYGKELDETNTVDELQGEFKGFTAVAAEYNKVANSSTKLQEISDESMANIVSLNTMNTMRLEDNSDSYKLYTSTSKAPDVILVGFSAANDAINGDVVEEQVHPNMMDYYDDETHMLDSGIPLPNKNIRLVHNGEFSGIKNVAKASMVQYPTHSQSAYIGSYRGGLKAVSELYGSKLELRQVEHDARQDCRLFEETYFINGSTNALPEINIDYNTVLDWLKERPDSEKILKDFDEVISGGLDIVGMDKVNIHEKLESRMKDVLMEDFEKGTNMPETLEEQRNRLIAWQRKGITMIFASFFKQVKDHLKRCLRKEIVYVDGMTPPQICALLNQIDGTDITFAEDDLKKQDRQTDHTLLDTEMEIYKRLGANPRIVDMWRTVHNKWRGKGIGIKFVSDASRHTGQATTAIGNAIVNLIVKQRLVKRLGKKLKLMLILGDDNIILTEGKITESEISLNSARHYNMQSDPSVRKDYGTFLRMMIYRRKDGMLECGPDVVRLCRRFQVLNGVSEQTDENVKMRTISYCCMLGDNQYTRKIISDIGKDVKLQSWFDMGSLMEVTAGKYQTTVEKIEGVYGWLLKMMREREVVIRYKLVPVEKRQ

SEQ ID NO: 1305 - protein, 2188 aa, Sichuan alphaendornavirus 22
LAIGTIADISIMENIVKAITIDKPLFIVPKGYKTDYDHVLHIDIDNDTLNDMFNYENNFDPDKFLNIVKMLKNSMLNLNYKVLITMWQTPINTDKVLFRVHTSPNTMNIKVNLQILTTRLKYLTNVNLKKNLKSIGQFWKLTNGINWTLTPSVIPSENDKYIGRAMPEMSTITKGPLVAVCFGSSTTELIIKVTKEIDKTIKCKIICRNKVEGILNSNQDYSLSLNGCSMIICHGGWHIIQFAIEFEIPMIIVPVMGDQMLTADWLQRLGCATVVNQYNATDIIKAIEDTDVTKIQSNLRSLKSSMKPLDAIKINNEINVYLKIPLQAPTKFEFGKSLIHRKPIHNLTYVSGKYNVEILSYIYDPITDKECVYLVFNKWFEANNMHHVINTTLLKSCTISSVQEWLCLNQINSCIVIGKQGILTIYDDTQSVICIEIILQTTSMHCREVEVNIKDMILLEKYDVEIDVLKMLRNEPRMLIDYNGMMSIIAGNTIGTIDIKTNNINVDIASRLKTGNWVHTRNRGAKLLLNIIGVVNNMDDVYITDSTNNDMGIYLINSTEKGLGISFKIGEKDYLITKVPISSQCSATYLGIRCRSTTYASIVAKTTSIPRCANDMVALQVCKQSKIECNVIWADNLINYELLMYHYDNRKHHKSDSSMMIENATSIRCVPNMIQVDKKKILSTHNRNINRLIVYKGRIKYCIELSSDFLSTLLAKMYRSRKHKVKSRANNLISKIEFDSTIINHCNEWLKLNDNNLSELIVIDMTKTHTVSDVLGKSIERIIGGGVPSEFTKLLQQTMVCFSKTEFELVDCETLFKVGLGIALVDGERVVVSLMHGCLFTSEKKGNGINIVISIISMILGFVVTGMIIYAIQHLVSSEFFSIVVNEIKTSMSELVNKADELISEIKNKYVNWSIDVIDKRAVRINKAKNLKKTLVASVIPNYEEDLIQLSNMLLTRPLRQWLLLQWNFRQPDVKTLMTVKRFKGDTRFDVLRTMIRRNDNMLNCLQTENEYLLNNNIQIKFKTQIIMPYLDMIQVDFQSLSDECPFIECTLNDNKVLFSPNSCWFYYLININTIVNEMPANTDEDYYTEWLTTIDGVTTYNSAETGLQILKQIVELKGETMKVRNDEEWVMKALNDFQATYVTLYEIGLPRRPIATEFQLIIKNENIYLITKHSKYCCILNTKGGSLEQAIIGAVVLAAIMAFGIWYFELYPENIEATINSVIDKISEGTMTAIDTIRLKCSNMLKSLTCSFNKVLRKVDVTNLGYLNLEDVILNCEMGIDINEENDNMELIFKSKAGGNMAVTMSQDKIMLILGRRFKAKDFDIHKEEGHILKNDQIYLLTKYTRMDEDVSTLEDEHIETLSMNSDHIKMVCSILNMNHEEFVNMCQPDETNLSWLKMNCDRESYQLGTSWIHHAHETMINSKGQLIYKIEDVFRKVRMITANDIKMITENRGKTFINGCDEILHLFSNVVYNANYNEHSNSLILSRLRHSYMFHMRSETTELLPRGIYTCTTDHLKINEQLSEFKEQLELTAYNVLLCPVNTIRKMQESAATILIKKMGGIIVTVMAHTILNVKTISIYKMPLLYIITEHVDYVFNFECAVLIMCDKLKGAGFEETWMHQDIEMLPLTYDTQRAKVTARLPKDVTNVSAMYGAGEPEYRGLVNYIDFDDNDFIPFMPIDHNPIPLGELGLYYEGTPDYIIDLWENKDLSTANTAYAPANNMRIISHEQPISIIESYKHTLVKYPMVSRPILQKKVFEELKSVNGRLGSVKHLRKHTIPTSITVNNICKAYFVDNHIELIEQFMNQPISYSDKATTEWLKNRPDCTKIFSELVSRLAGELAIKPPSDVNVHIKIESLFKEDPIMNWKAQQSRIIVWQYKAIAAIYSPIFLEAKRRLKLLLKDNVIYSDGLTPSQLNQRLRLCKGVKFFYENDLTKQDRQTDKAIIDVEFEIYKLLGVDPTVVSNWKEVHRNWRFKGKFIKGSLEYMRMTGMPTTALGNFITNLQIHAAWAIKNMDRIVIVLFLGDDALWLCSQEPDNKGLRNYIATYFNMESKDVVRDTFGSFCCLICGTDETGAPCLSPDIVRMKYRFEVINGTNRCPNDILQNRTLSYCFMLGNNIETNEIASKIKPNVTLPTWYKQNTCFEVCALKYEMTPEEVMQHYNSLISMMRVEKTIEHKFILSSSSWK

SEQ ID NO: 1306 - protein, 3871 aa, Tomato associated alphaendornavirus 1
MAKKQAKQRQHKFIYSGHYPKGSARNEIKLKTLDLYHYGLEGAPANFPTFTKRQCLKGDNQYIDTYLSDMNDVVNTRKLGITGVIDIYHNRKKYPVDKPYDAWTFNGNTSHFRNGKYWIDDYHGEVEDKLSFTNYRCDLLNDIYSSSHTHGTNRKYDLVNWLTDKSIAFPYGNMAQKRDGMLELLPGYYLRCSHCECTTYLPLSTMLPNTLTRQQVTDFLRQFRDEKECFMPDAEVYGEMAMMIPMCFATSSGECFNCNNDLFSAVLEICAALYSESVAYYSRIRGTQLDELLKLNMLQGAPPDDMPTAAKQYNELHNRQAAKALSKVNSLYINTLYAMSQRQRTDMMMERSHISMSTASRISNTTLEPFEAEEILLIADLASMYVGQIVHYPTNINTQVSLRDVCTTICNGSFFNDLELPIKPTTPPAAYVEIVNGTMDLVNVIDKMVDGAYLLLPREIKGNLYEHVDEEYYYSATTCSTVPVKWSRPVLDIFHNLATLIIDGQHYHVHTVTNGQYMQVVTMTAASDPLHIRCILNYAEFEALVPVYDTSNPLSTLGIFGTKWEYKTINVELLRRLVTFAITADKTSSAIEAYFAGIISTHYTIGGKVVDLTNTPITEGLPEILYAMLILSNNKLVMTWASTLHLHNYSLHNGAINLIDFFINRIAKTFISRLEESNPWFAKVLSSPTEFARQLKDHAEKLQFDTVFKNLMPTIAMDRQYTLGQNMVSKSFETPYACTHHTLECKHSIGQLHCVCCGIQSREPLCDCCSKSSICRHACRHACINKGHFCDKCKSNAKCYNRAICNCCGVYGCMPCVHCPEEPAILLKGPTKDIASKIVPIITNNALKIPKRHQMPAPTSSTIRFEPTGGDACVKKSTNSYTFKSKGKSYTLLADAIGIKDVNDIMIRVDDYLHIPMLAFTGVYYVPITLTDNPISDPVHTHNYCAYTCIAKQTDYTVVQLQNIFGDRPSLDKTEVIELIKSLRLNCLLITNKDEADIIHYGQQSAPYIIIMHGSCATGINHNHWCVGHIPVFNEMPTGYYYPHSLGPAPRDLSRYNMWKAPAAEAAEMSRLVQVIRKQRRGTSADSLQLPTVVDRDGVYWLTNAKEHNPRYGLINTALPQSIDQVFIDALNGVSDKQIDASYANFTNEWSNVEQDIHNSIRLHCLEINYSIRHMEQPTTDLPMSTVDINHDEPTIELVNMGRLKPLDVVTLLHDGKRHNAVVYGEASNPMVSNHFGKGSVLQISKTSLSSTYRALLLAIKALGNLNNIPSMKIVDAVDGVAGSGKSTMIRNLNKKDNKVLVCKTRSAINSHATAGFHASITCEAAGMIIVPTLCVVLDEASMITTVELAALIDHPNMEVYMFGDSMQIGAKDMSPIKGMRQEISLLNQFKCTKLHHTHRFGNPLVANVLKSFNKNITCDDDKTTTYEQISANDYHTVAEIARSKRVDAIYTFMHIDYTNMVSEIGSEISVNKVHSAQGKEFDTVMVLHWGNFAAEGTIVKSANFIFTALTRARKHVIWVLPTSIQIRLNEITNITYEGSGGPDTTLSAFDIESCALTRALTKVEVELLSRIITSNRNYDPAVCMHYITSDSIRIQAQTKYLGSTMNIDFTVDRKGFHPNNTCTNAFKNMIKRRIAQEFDTNFKHISTNGDEIQIDIKQSTVKKPKLTFAEVVDIGSCDSTNINSVIARSRASSILSDKDEYYDAIQNFTPESYAISSVIKSLYLNKSTWSNIIALADVALATQATGSRLQTTIRNEVVYISVFGGCSLYCGFKFLFPTTCVVISSAHNTEGRDGLINTINCANRHICGIEYDVNAILQFITSTQVFSSVPDTLCFTRWQERLTNMAQGLFESCDFSTAGTRHKVSNTELAEQCADYCANWTIPTHQPVDAYFVKHHDHYVSQPSNRQLFSVSDMISHNMGIQGDDAVFDVNAANKKKIEKILIRHMNAEEKFDRPTYVPHMMVKSAMHSEFVQQVGANHLVPTAIGCEATSTLHLAMVVAANVLRQMLDVDKVHHVGVSGQLFCLNHHVGDTISQYSDNDILLIKNMMSSKLNALMERKNAPISQEDQLSIESNIKYYSNPSSIMCFDKESVRIVHPALINDNMLGNTYTCVPITCDATLHMDNDGVIHEIGKNGLTFKLGMGHMQVVAIVGNYYLCKVVCKPIKVQLAGIDLQLNNFRIFKSSLDNNNTIKIPDPIFRRLVARAFAERDTSINDMIAYSRSLLNTMTYTSKGYSYKYTDNPLDLLQFSIVALNFAQRNRKLTSFVQSLLGAELSQDSNNKVSQLLSGALKTIGLQLLQGPMNNLVEAVHDTVSAITNNLPIAKDIYSLLRDVNYVELHPKKQVIIKQNQTRGGYLDAEYDNDTTNMRSVEERTHDGHDEDTTVTEPKDNTTVPEDASTNQARLKQNTHAQGTAVVNTKSGKKPQTRDRKWYDIFGITTTNAAKSRVPKRQVCLLYAGSRGDNQPLNAIAEMCMSMGMSVIAIAPKDIHETIPGVDYEYYIDSYDALTTAGVNQKMPQLSTISDHMVAVYNVWLKHHKVHDYVFSMFFADEADMVHACINNYRIIPQLSETWDPREKLSGAGKWSMVRKLLGIPKPPSLPLWSVPSAWFLDDTNLGYLFTKAQLSVDKATDMALQFCDKHNGNVTLITLGSMVPDNYQSVINNMLNTTSNAVIFVTAKLQTMQNKFEFEGRYYRYCDFTMHQRILIIPKCNYLLLTGKITEAKHHFGAGTYATFSLIGVKQVAYPQAFDQKFNAKHYTNDRGYHVYDPAAEYNRAARLLAKLLNQSLPATTIEVLEFDTLPMPCTAINITKEIQAQRVIVHGLKPLVNNYRVNCVFNVLFDCLADNAKLCTMVESYLTVWTFHTVQDVVALLLIIPTNAVIVGPEFSVKISRKDVTDNVLIQINSSLTHANSFEMESVEPINEMVGASYHHTMLTGEVEADNTFLLTKLSEYETVTMQHAIDNMVKTTMRKSTSIHSVESTCYAGGCKVRERLAVGYKYLCIGSRGAFYALSTSAVDGSVHLVHLQPEVYDCVIAIRLVKEYHEAVATSKGKVKNTSVVAINHATRKKLYSRGICVGNVGVVGADKLYIYDTWAREHHHEMERQVIAEAKEILIVPERNDMPMIRSHNIKSILLSDNYPVCVNKGGTFFRLESTDEVTSRVCCDLMHAKQLTKDLFILPYDDKIAHLVGNAFIYGGTKVTYSNIKEVEIPKNLHAMLALSQIETPSIYRLCENLALQNGYMSLSECPVEITRRKITLEELSLTLRRKMSIFGDVFVIGVNSWAFQIVRKGSGFVYADEQTVLDVTDSKFNVSKYNTISAAARATGIANDMSSLLPIDGPKTNAAQEVKCLAYHAKENQLIIVADVEDLSTPIEVMRFDEIPQANVIDYWNNSELLDSNIILPTNRNFKVTSRIQPIRVKKNFYLTMEDYPKFARPSRSKAYAEELNSITNRHGAYKVHRTVNLNTSQEVDMFCSNYFLPDADTILKQYRAEPVEFNAARCQAWIDKHNMPASVKRDIREMLEMGWEQRPINSMEVHGKTEQTTKLKNARWFNEVVTRSIVAAPYAVSALFAEVFMEMKQRFKSVLRSDVFYSDGSTPAELAALVRQCGEFKYCTEDDLTQQDGQTDRQIINIEMEIYKMLGLSGNVLAFYRQCHDNWKWKGHGISGVWDAMRLSGQVTTALGNAITNLIVHNRFMLRNRNSIKKVLFLGDDIIFLSNTKLKVANHGTETKELYNMVSKVSDRAYVGGFISMIVYNISGKSGICPDYKRMRHRYSVCNYTYPMDETQSKVASRTLSYLFMIGKNQWTQQIVSKLGYQLTLPQWYHQDTAIAANCEYHGETEWETRAHISALRDMLEKQVANRKQIMTWSAV

SEQ ID NO: 1307 - protein, 4941 aa, Triticeae associated alphaendornavirus
MACLLNRNIAAKFTGGLHPHSIGCTASPSGSATLNLGRKNDSVRKMFRNGGKSIKLGQNYAAIPAVMSCHKDEHNQFVEFGPEACIPDFAHLDERSFRNFLTLYAFGHCYVDMTTTNQESILRAAALQTEEPIFGTKLYWSTMTPELLPGFKTDPSPDREALNFMLRVLAKFGGSIKQLMRTGLIQNYNLTPHIYKKNCKYGFKSGEMPEPHGVRLCHNCHTCNFIWLQHPDDGVKKQHCGACFFSLDLQPVDSEWYIPLVVVSDLTQMGVGTNQLHMAMLVGDLDKSGDLCKTTVDKLIAQDVKNMRKIMSRKMFRSIKVNNGMSKRQLDYLRTHNLSFQLIPTRGTPNPHAMLAAERKLIWYSMVEKVGVNQAIVEIGARKCRDNTVVTNWHGIGPTMDWRDVERYSALGVPTGSCGHMLHTCDCELAPNSLFIAVDSLYDVHPAHVIEAMTRNGGQHLLFTLTTAPVNFDENEGKLFFDQGEWFRDGSKLLTSLACDDRPYENDWGNTKVWSTAHVIVHGEYVLNLNTYNVVGNHIMRVGHLTKNKMIKPRATSTDLSLTGKLTVQIPLIQRDSWLSQSWVPVIVYEQREIDMQLMRALQSRNLTGGVSFEKMLEFGLAYAHTKYTTPTKTVQYNHLSAEDVRVHALLATVHTRRKLAWLLEADTINDPKSNYGVTFSGAAWMSTVEYLLSVLTSYEGSGVMHSLTSEFGRKMEQTIMSWMEDPFWDILDGASACTFELSTIIVNTTETQPIEMSSNPILCNHHGMACSHGLAGENVCRCCGIAGRVHDDLCECCWANHCNHKCNHPCPDPNLHLSGRGKLVTCECCQVQHNTTVCLPCKVLITKNNSRHEPPVFEVPKVTKSKGEHKKPNLTRKGKDFVRDKQQTTKPTNEATAEPVLDGHNADATLPDDHMVGTIMHQWLQSRQETSQQHQTVQGDGQPQGDNVNDTDGFDTGVTPDIPDESTEDDRLSLELAKLTNYDYAMSVAYGLKQAVLECTTSPSDYNCKNRPGVSQIRFMPFGRGSTLTSNFQIMTVTPVVGDGKCGWYALQQAIGDEASYQDLVLSAGNKRDWFSADDLIKYCGELGKNCLLLFKTKTMYYHTNASDDSYVCIRHGSMIQEGYQHWEPVNVLQQDLQEYLPCWHGAWTNRDSKKMSRAMGMSYEITELSPTERLKLAVELNKKNRPATDRANYKQLMPFIYHKDGNLHLSNNVANCHDVSKGLIDVVVPSWASQLMENLCSDLCEQVRDELLTTDYDLPALTDADGISETKAYLETLVVELRELAKELTPREFESRERRSKWKEYNIKCSMNANGIRTTTLQHTKLKTGDLVHVGTNSRVTRRFVTVRGNCVGFLNPDFLSGTTKTLKMYIPKESYKSKLLNLLCALRQHVPIGEFKDLIVNKSSVLYGPGGSGKTTHLISQLQHGDVIVVKTRIAKETIISKLETTDVTVCTHEHFSSKQVSAQRLFVDECTMFNWFDLFVSLTNLPDAIYFYGDLNQVGAIDTHAKSGTRDIRPVSEWSKNIKTMTTTYRYGKSLAQALTAAGMPMTSMASRDTEMKWIPVNIYQPDVIRDFINQEKPNVILTFYNSAADKLRQITNVDVETVHSYQSREADNVMVIQWNTESRNSKIWLDYRYCVSAATRCRHKLTWVGVGLPQGCTLESVLRGARAPPRQARPTSLNFSAATAAMGVGMRWMNDVKVDDVVILDMPQDEPQVGGNKFDIIKTTPWSLDDLRIVSNSHTADIIYNWAGMSIAEIFDGFVASAPRFTTVKRHGTNIQIRGLASITFEFDKDNLSARVVYGSSMFLSTVRAEVRQAAVDETMKLLLDLYNSNKLINWYQGLDFRLKELLYNNWGEQLGMARLDIAEANLANELSDKHKSDDEEMPELISDSEEAFDSDGDTEEFHEAVSDIGELPDFIDFGSKSQENIPARVGADFINLLYPISDYIVCQVVQSVLTSQPVSQTKSFEPEGATLLHIYSGGQRVFTLQSLFEGMNVRVNYDATAGKISEEFGKVVSVWNNQMLREYRGSDMWWNINKFKKDFVKSNFGDIVIGETMTHKTKHDLLNTLHEAVIAHLESIHVQLNELELYASELLETNDADMFTNTVNMFENSDDNYHLCPDAESWWATNTCPSGYDLVELDIEPDYALNLRLLNEQVSTRVNCGVPFFLRTNNMEVRLDTFGGCALCAGLSCYLGDVCIMKICPRKTIRINNKALIRRGFNYYEVGVVLNVLSARTDIVQEMFEFPLETIEKAAILHQILMTPGYELGMLFERVSQILPLLKTLPGRKENWKLCVQHNTGNKALMKDVSVMLKKEWKISKENRVLGHSDWTANPIQVVKPGEACFVQIVDGTVWATTRRCFVDGRSIKCCSFDEMVDRMLRRRVMSVPWKIARICMMKNPNKLGIGAQPDEHGSSMNMSMEYHRQHNTEVYNQFRQRIESELLQCMIKPSHILFMHADQYKRYNNLTSTECANLPTEIQNYDIMERGFDQLVENVGIKFFYNELPQDTMCVAITDYPYLAMASSCWGVFCHYGQKGRETRYFKNLLDCNPILLKIKQIYGPSKPNDQSDETKAYYNAINNAATHQIESGEGPWFTTRLTPLNENITYLYMGLTALWMNPAQICDLLKTHKVKKAVLKCPVMFNDSNKLFKIVNETKQFYDVAYDGSNETTSLNKETYECVANGKIWGNDEGHLIFHTTGVNLGHSHTTVLFVSSQVKLPRYCVPVQHMHKEQHVVFKIPRINDLRRMLAECRAMEVRTVKIESKLYRSLSLRMLRPNTTFNDLLAYARAYANSTMYTSINYHTRHQQCDTSLMEASLCVYYESTRLNDSISEICKLLCDSTKPATSLENVWASTKAILINMLNAFASMVHPEVKVDDVIKGLDAMLKTNENTFIQNLTKFRAIKIVKEERHSKLLCRQDGKMFGGSRLQKDLKLLEQFVTTTGGLTTSGLKQWWNQQIDQWSKTELVSQLDVETTLSTILRELSVCNGQKLSTTLFQTVGKLGLSLNCGTVRQAATLILSNLADPIQVIPNESTYTQLIEFNGPIFQPCNKFTKHDGDTLSIFHGIIADKIEQVSWRYPENVDMLRGDTILFSTIGTLGDVEPFRNLAKWLSSLGTTCKFMVCTPYDELLRNDGFEVFTLNLDSERLIKHCICMESSEMGIVDKAKALYEIFDLTSGIFDSSIKQLDNFFKGVSLVMETPFTHIGVQMSQRARIPFLLSSAYPWECGNGNQPAGTHQSLRTFLTRSMSYLPFFQHLMNWRAKHLGVFNNRGVLVAAGGTPTIYLHQRELTGWCVSKSSQVIGYPPAVMEDNNKNEREMMLWASELPTAAICMGSMLGPEAITRINRCKRLLPNDIKQVLIIGNHEDGGHYEFEGKTYRTINQINYNLLFPFTVLVMCHGGCGTVTTALRHGNAVLVDPFFGDQNTWAEMVTTLKLGWSTRDLVKPDGTFRRITRKQLVTAVRNAITNSTKQSDSHSFMNFVASYGTIMGKSREYLRHLQEDQDWDGTMQDVYTNECNLAFKTQTDPSWADVADVEQLIDAIGQIDSDESSAQFVSLQVQQMSHVPTQNSQERNRCRQVRDGECKTTGEQKTFGTTQPLRFRSYNLSKRVRLSGKMLGQNPKAPAKTIRTQVEDVEQHQSIRTTSKVAQAVQTSEFEQPLITNSSNAMTNSDRENNVMVTKTCANLSEENEAKRAVKKKRTCSKDQETKDELLWHCNVLFEQNPLMETNTSDQLDTENRRMCDDQSTSERTQDSPCAKTVNENVLTEGTNAQNYDENVSKKPGQPSKSFCVHAVGPQSSHHIQHFWQKRTIAAKLTLPSTLARGRIVEANIELHRVTLFNPANQGTCVYDCISMLMTKHGWAERNIKRSLIKLSHWCSSNPLPVEAEILAMLRLIGIPIGLVVQGHGRIVNFCGTPPKWAMSVTYQHGLGHAVIKEVKTIHNVREAGPRKVGFTALYRELNQLADTTRYSIDDFRHNWLCKPSELQTQMMKHFCVSRVNILAQLKLNNYEHVINRHGKCIFHVGMTYDDKLVHTNFKDLPFKLGQVALLGTEEGFMACMCVPVGDGMVFLPLCNTQNCKPDGIVMYTEVKLMPIARRRPKLILCNLPAVGTVTCLNEATRSYALKHENTSLCTTIMDQNATHLMIYECDGRKHHMYDEVELVKRFDVDHVIGLGVKITGPMYRMLTEQNCGFRYAILKGKSTAVLEFTDEHVKAGVNTLLRLMNVKPKTVSTSLEMELGNDKPFLKNRLKQIAGSLNAARGHTNVTVPKWADIWGPITADRVAELKVDLGALEHLVDGNLVEYEWKISDGSSKVIPIEANPLNVTCVPLGNSELVCTKYVCVMSFRKSNNSISGGADEPVNWKLDHDYKPSSMSRWWGMDEPKPATNFDVDKWSTRLNTEALTTVFSENYKATSSGPVISSAVIPTNSLYTPICEWANVSSNWEVSEEQFDMHVVSLWTDGDLSDWNDKFGPTNDAKVFSRLPPTQLRLTQKTTLKEYPAYSRPVLTKCANQEFNAVTGRLCKVVTYRKFEYNIKHEITEFMNTYFDPEKHNLLCDYQRDKLTFNDSKVLDWLRERPDSNKIADELEMILSSGLEVNPINNIKVHLKLESLLKEVPAESIKQVKARPLMWQTKGYCALFSHIFKEVKIRLKNMLKANIVYSDGLRADELAARVRQVSDANWLLENDLAQQDKQTDHQIIAFEMALYKELGVDAGVVNLWHRCHFHWKYKAATVMGIRDAMRLTGQATTAIGNAITNMLVHRKLAQQAGNNLKLFLILGDDGLMFTEEMVDVHKLNAEMKTKHNMMCKPRVSQQVGTFCCMLVAKNHLGQFSLGPDYVRMRRRFEVTNGVSESTDANLAARTMSYAMMLGATPEVMNMVTINGWPIEPLRWYDVDTTIQACRDKYSMEDNEVYNNYHELIQMMNTMRTYDHDFLHWEEKW

SEQ ID NO: 1308 - protein, 5284 aa, Tvarminne alphaendornavirus
MPHRKRGRKLKDEVATKMKPQPCRRMTDAPLLNRSLRRRLAKQEGTQFVTAVKPLQATDKREWGQVCNDVRIDLKNPTLKDYRDLQSILKNPLLGFTMTKKVWNKMLTTAKPDLSNWAKLPANQLLIKPSLRPDKPDATYLDGEKNMHKLICAAFGSSLDSIREWKPTSIDPSTTSTLDKHGNLKLEPSALLTYQLKETASKEAKDLVAKYESEIKAACRHTTCRQCGNHNIVMPRLFPMTTTPKQNSILANAMALGQKDIPGDDIRKFCSMQNIHWPGTKTVSYTTWSEGPRVYDMMHCGGCDSDLEYDYEPEEITLEHCSDNENYTIKRMGTLIEEMGVMGYLDGAELTPTARQQMIQHDTKKVRLFFGNYRLFLQNVYGNLTNAEKLEIVTAYPGAQLKQDASLIPSAPHYATCKRVLLEALSTLLQGKKALFYVDGKFQKFEEHEQIGRVLNQGLNTGNDTGIMQLQEGGIAIVDDGCQFISLFDLCQLMRSTKRKQFYYLTNLTLVDIRKEEDTMGEDQCYYWNCNGTTKMCLNNTGEVVSYNTKNVEEYVRADFVVLDVGTYHIRTVQVLGMWTMRQATLIRSQRALRATQERPSYSNRKVSVNLPLVKPMGLINFTGAMAIEIVELQVDPTIFEPMFIRNMDNKTSWQALVEYGISIAYQRYNLRDKVIHNSHLTIEQIKLHAYAVTLLSERLYGRMLGTTGFMQPGKPWSQMFAGLKLGFQHAVLAGSMSLLGEAGKSIQKLLSQRNLLQVKSAGKTVDWDLLQSIANRQVWETVSVVTGSATSTPSVWSPTTTCDHHSESCRHEITEFFCGHCLMPYANETGWCVCCTELQEEPQQCDHKRLSDSECDVDHIHKMVMCNCCRIKHCGADDRDCVHCFNVDTPLTEPTAERVVELAKELSGGEVKPKPRPSHTKRMPKIVKTYSYAVKQRVAPKKPTVKVMDKLKVITVQEAKLTGADDSESDISNDEEKDIMMAISRLTRSTSKEYAFLVWEGPEAWKKYCKPSTSHHTTIHMRHNSQLKFIPIGKWTINSDRLRITNFSDTSHVYGECGLAALRAATGSMKLSYDMMLETSGKTGDWDALDLSRAAAQCNLNVIIVLPGTSMITKSVPGDSFGVVIHSLTCEGIEGHWYVGNVEQIGPANVHPNFNDSTSWQERAAKWHKYGANVQQVDWQNVDFKVRLVTENELYGPIDACMSAELMPMVVRKEGITTFVSGNPEDKNPISTVVPDWALNCMELWEPENPVSMLNNHFDTPFDIPPGMPEDHNAVMVDWLKNTIKTMLQFSADLSRPHGKSNSNFSWSENRLLVRTGPNAYVTKTNGEWKLKLLDVVSINFEGTIIAAPVISVSDDMVGLRIHAEKSKLQVGMSVSKTSIASLTYLVHGILTSNAGHLKKLLETAECYDFVAGGGKSTAIGNRATRNSTAMAMTRTAQTVLKQKCKAKRVTSWERAMRDKVSSEELFVDEANMLTWQQMACVVTPSVKRLILYGNLDQVGVIDTSDTWGVRVQQSIMRLCNNVNRSTTCYRIGTPLANALGKTRTNLSPGTGKTTNYRMEYWPEMDYDALRSLIAEENPSTVITFTRKCTYALQKELEEESRDGLELVRAHGFQGAERSVVAVLQWSMSNAARGKHLEFEYTWSAATRANKKLIWISVGCYSPGTPLNVMIEGTESGSGIMVREQGQSYSLWALADSLLRRNAPTGDRDGSGVCTLTEEMGKPDNRSLWAKMLGTERELENCECGDTEITVPTTTDPKELLTTLQRVIKAKTGKDCKVTDNKLDLGFLGDLTVGQDRKVTINDKWNMLPADFAKNLEQLGFEVKEGACENCSKRNNPGSDGNWGDKKTVDLPRSIRNDDQMRVINHTLSLYQGYKVGWRVALPSGIVVIKAVSGCSYCMGILVRELDQTDGKTNVLLLHGLYNKFATRKMDFNGSKPALVAEALCYMGVSEWNSLAGVASNLENVPSFPISKKFNGAASLGILLERISQLPGFLTDKVKSLVGMQFIPCHHHWKKNNTNYEVKRNSLEAIGWTVRKNFGKYWGHMSLSSAPLACSYGTDYYAVIVTNRGAILCSLLGDSPTCKLPEECGRVVTQGVLLRMVWKEELARWPFWLAERLSLSMGSIDGPIGSIEEAIGKLNFSLEWHKENKTGLHSIVASRTSALAVGSMENPASMIKISATQRKKFGPQLSTLGTKQIVEHNFMMLEHSYCGLVEQVMVSCLSAQDHAKVLLMSNNPCASMLVHQWNVCSVPLPGDDVGMLQYMESLPFADKMVETVKRMFSRPKPDAETDPEHFEYLDSLRSDAAKQLELDGPWYSRSGKPVNCEPERVLLGVRACTLTNKALVDIIKSFNTYTNTQATVQVLVPNLSSEDDESVFISKTNGKLSIRYEGHPYEIAPDAETYDCMISGKPFRVREESYRWATINNVLQHGVLELIKLEHHSAEFYTSPPAVSNRDLVMIELPLVEADPVGAIRSGLIIKMKRVKVSVSLMRALSLRAAREGTTWQDILAYVKFLKQNAWYSRTGIAPKYRERIEVAMHTALFVYLNNLMDNGKMQPMIDYYSRSFGDLDNAAMGGLKDLMLSLWQQLGSALFLDITLTDLQEFLETKFELPGDNLFKNWLKTFGCLDFKMVKSRRMLLKWNSVATASIVRAPPANRLSAPAWKRKMTKDEIIRNIQHMQVHQAEGQAATQSDQQQANATTAQPVHSVITQENGGTTTGLNTSRVSGSTSLTRREVDGESKNPFFYPEEDDDQSNEQVKSSDEGEQIEAEVPSDRKNTQQHSTAEETPKDDTIDDSKSDASKFKRVLTHEEMAKAMNLHLNILPNKRYALKTRMQRGNYTSKFNLTPITIYNPEVEGHCFQNCLAYLADLEEADATLIDSLAMLNIRRLVSEADVITILTTLGENILLMNDATKVANLIVNNDTADTCVPLLISGYVTRHLSVVSPADKTISNLQWNECTGNRVETAMDWPMQSETEYGNPCYHPAGTFIVDHDCSVEKVTVEINQTINAEKPSVLDLFKPPVITDNLIHRVARKIQPLITSECNITTQGVMCEEELVPWDYVAVCATDGWYIGIVTPTNNYSQVWVLNGTSTMNVGSTRGIMKLGQSAVRYGRPAKTIIPAEGNQETCLNNVTAKYLSNNLNTMLPVVSGPSAALHIYEYQNRAHHLYDESVAIRLHSISQFKFQPDPIVGLWNDERRKMLVQARSVVNLSVKAGEPILTMATAHTKEISLLLSDKCEIIPDGRWNAEMLQMNFPLTQRGKNNALATMKQWTKQVGNTYHYKFYKEACQFATALQLASAITRVHPVITLAEMIEHEFPNGEFHVRSLDEPQVGISTSTFDLLQLEPGKLLSKVGPWLITAPRDPQERLEQAVLLPLDTSGSDTSSESSVNLFSDKESEDDTSIEPPNWLEDARLVAGQTVCSEILSRWDQNRFLPIHSNDAEMENRHKDGSIEYLDVVKGYPYTRDYNMELTTQFWHFCAYIALAMGKSGFSDEALCGPLIESWDAKTAAFIEFRCCSRTRYSGAIWLGETEDSVISAAPHHGPRCEIMICTKQHTVDPPRTCLPVPSNLGLQWTNGWQDHWHTWVSHDKSHWYANLPIPAGSVCIQSDQWRLFMQMSFRSDGRIKPSTNMEEWSGCSKCHNTRSVYKSECWKCNRAMRLVEGCPGCNRCRDDPEETHQPLSREVNETLFGRTTNEFITKSKPTKTKMANVKSWYFNSAGIYRSDKVVGRAGDSTYPHAVTPAIARAILSDDYTGLDPPRSVLYEQDFTDFLLDGDYLTACAGVSYNEEFNDVIHHFTSMFNRVVVITDHPETYIGKTNVLTIGMTFDKPIDAAMVRMLPMFIGARRLNITIGNGRDWDMINDYKRLRRLATMTQDNASQTLCAWNLHVGGVVARMFRVTTGANKQWLRPFIRCLQHVGHVYGADEIFLQLLSIKVLYFPSVPVANRMIFTNYSLPWRFYLRRAVMVLETEGGRTINVRNTWYTAANMIDHDIDLSEDGNNIPKEVLESINRSNIAGDNRIKPSSHSFADRVTATEEESLATHDLHRNAPVAGTTDSKEQSAATSGLDNKEQEAKDARQETAQSELASPDEPSTSGSQKSCQQASADSIDAKIDQLSKSFSELNVTESYPTDATRNQVGQGGTTVEAEATAGTEQSTDEAEAGTNANARKEVNVAENEAELIEDGDQLIRSMEPLDSPTPASQLSSLPEPHQRFAERIVASCKECNDFDGRSTMLNGRLIISHSVPLVRTNLHARHILELRVATNINHDRIRVGRLQSGHPVVVEMLSDSCDVISRTLSSWNIKEHTSHVYYTANVNELLITDPHQSNKEIHSIVDEATGKSVSRVDNRTLAATIFLSIQTGKALSPVCRQHVFNASNHCIGCGLKHNDTNIEHNTCPRCNLCMAGGAHDKLHNYCRCEKAHKLCHCQLTGKGTAMRDTWFEEKESNNQAGRTQASVGQMRWKYNLPSEPWLKKYAEKKSSDVKEYFQPAYNNITALDAMEITELAEHPTIIETLNRQTGPMIYIEPDKGRLRLQNPDPMLTGDGHVPITVVNLWEDSDLTDYNTKYAPLQDMKLGSRQAEGSTMMMTKTTLVKYPTWSRAVLAKQYNTEFNAVTGRLGSIVTLRKEKINVSREVNNFIKAYFREDCAGLLEKWKTKKITWDPSTLSEWVAKRKDWNTLSKDLVRVMQEGLHVSPLNSVNVHVKQESLLKDNPIHFQRESQGRIIVWQAKVLCGMFSPIFLQVKDRLKQLFHSAVEYTDGLTPSEIAARLRLVNAEGCFENDLTKQDRQTDHEIIDVEFALYDLLGVDPTVLKIWREVHHMWRFKGTETRGQLDAMRLTGQATTAIGNVIVNLIVHSQFVLDNMKHIKLMLVLGDDGAILMDRKPNLDGLRRRLEDRYNMQCKPNYYRGYGTFCCLLLYRTLTGFWEAGPDYVRLCRRYEVTNGGNHVTTESIPYIVINDNELTQYLITDQPVPNVNFQTYTGVQTEKRATPSTVVIGRSIPKTIETTKLEVWASLHWMKGKPEKTKYGYLAIPEGENCAKLSEETGCYDSTQYAKNLGITCSGGSDIDPENVKKMQDHLSSITGSTIRLVNRPEHVPEGLEHWYIGTLILREPTFEGNNIESRTNLAYCTKRQYMDNHNHVKINISYFEDLIKGTNTTTMRVDSDMRLAGPQQAFGYWSIPDVVATLTKMFENKQASALLLRSFSYLMMLGDDETLKAKMQVRGWNIELPSWYGSTDCRVACANKYDISIDEVDGFISNLAGMIFNPQPYHHDYKILTGYKP

SEQ ID NO: 1309 - protein, 5825 aa, Vicia faba alphaendornavirus
MKKLTATTNKKESPPAPVGDPFKKTKDSVSFTGVKTEFYGAKTPCSTGIYHTTCCVPCEDIDIHEVVKAASRDDARHYQEHPNSPSNPELVNSFNKGLTLESYTARQKGERNLHRFNRNINALVKNLRTQKKQTERSSIYCSPPRKHLGRRPHIRGGSLHPIPILGQSDQALGNTTGVWSPNRAPSEVTPSQRPGITNTTQAKSSDGGQPPNKSLPFHFNTHTHTNKPMGMHHRKRQHASVRAHNATKSARVSPPTPPEQCKAKQTQVGNSPNEAEVFKAMMNNYRRSLVPKEKPTIIKPTIPYKVASSSIDPIDMPRNRPLQSVGALDCYVTGGIQTKDVTGSGTSNLDRFNAMLRTLNKSGMHTSRSTSMTSEFGGRTIGLKKPLDSIIHNVNLRFCHTQVRTSEVLASASKKYESNKNKQGNTAVTTPAGKVCEHSRFDVKGEVEFTCGWCKPCKQLIKDALEVTHKQGTWRRRPLAIAATKKNLKECGSTNMFSKNNLNNFLKYSKPLHKLMKKKTLTAMCFASDPRNKGAIFSTTDAGNNRESSMIGRDLGMTLRLNTLSNNAIQYILHAYTNKTLTHYVSEADYQSFLKSTRKKTSDTPAIEIAPCKRYTHLYPEGSEKNMGGTLLYKLVLQVIAKRAQTPQANILRRDTSLKGIRVGNRVVVPLPSVEHRIQDGYDRGDFGLCMTGHMATRETLLPSEAPYMHEMFGHKCHRCKGITVLTKGHTGDKYDASKATSRGRILNAIKYGVGTDKDLADVYINTQLINSYSECGLTTEAHQWNTQCGFCGHQVLDDPPAMVEEICELVTANTDNPTPMGLLHHLEKMGYLDGSTLDATGEARVVNYDYQTLKHQLSRARQDVVVIPSRITRDRREALQQCAVELEIGTDVVPQLNDSTLYATTKVLLAIPFVTNDYQSTFAYGSTDLGITGVTPINMCHLTPDLYMATRPSITQDAPVMKESNTLLIDMNILRMDPMWLITECLRRKITTAYYVTPMLELDQNPDQTILDGEVQFRKVENQIYVITAWSDRPIRVTTENYMNWTKVDAFVIGENTYPIDTVREANGISLRRIDLAASSTFEMSEVVETVGDSIEISVPTVYYYGKPGKRKLSMSGEKKVKLHRELYRRMMIRNVSGTNSFKELVDYGIGISNMKYNINDMVVSFSDISDDTIRHTAAFVYSKMITRANSMQLTERVLESVNTARGFLASLLISQAETMLKITGLDETMLTTVNRWMSKGSEMVRLKGMLMNINSLDIDNLMCYSREPVIRHLRAQETLELEPTGTCPHKTPDFVIKECSMCECCGVNPAIGAIGFCSSCLPTDKHQCDHPCKHAHESEAGTRCSCCLLPIAGEACPCCGVNRQIESEILFENSEESADEAEEQNRVRKNSKPRRPDREKGNRSNNRNNDSRRTDANHHSNVNYHHGHNKPQRQGATQQPPKRSAALHPENDDNDTPDSTPTVILTADPTTNPPGERQAPGGDNIPHENDIPGPSSTTTQSSPPDDTNYSGPEHNRNIQNHRIRLIAQTNEFFGDLYAYGNDIAVKKNSHKLMPPNEQRLRSCFQFMNMGDSIYATENLEVIKTYNTSGEGGYCGYNALKILYPNLDLTLEEMQEIVGSETQFSDWEIMRVAQAKQLNLIVVTERCALVNKSVCSNEFGVICHCRHRGVMLEHWEAALAIQKGFADYHPTFTNALTREDLLDFAKSSGLNKNKVRSFVLGDPRLLKLQTEMHESLSKVVEDVNPAGFVKITKGSTHYVTNDRNNLGYSPQYGTFTAQITEDNQELVELLLLAYSAPARVIHTDWFYDRPESVPADATQGIHDYGKQLVRDIAEVNQACAGDLIKSELIQNRVDCKYEYINNHLFKVQKTGKLKPGDLISGKLVGIQSTSYVDSHVIGYVIRTNQLWCTCVTEKCAKATKIKVDLYRKNTGSGLRALFGIFRWDFRRDIKTLLEKATAVDAIAGWGKSTEIVKLVNQDCTVVAQTSAAVSNILEKLEQGGKKNMCKVMSIEKCMTQQVNTPTLVLDEASMITWETLSLITGPQVENVYLYGNTLQICVLDMYRTGGSRATKSILEQAGIIRRHYTTHRIGNPLARELSLVTKELTTNAKHETNFCTKSWDAVRWAELTSIAGSLEEPVILCFYNNAVRAVMNYLKVGCRVDTIHKFQGLEADNVIVLQWCPTGQTPGRITLDKHQCLSAATRAKKNLVWISVNEYSNNVPLHKRMGATIGGSKHTQPDTENNLADKTLQVVSHLLSKVMIYSKDKTIERLECSRLQSQEEGNLVMLKNTLTHLDVDYVSGNDQHSLRRQGSGKLNEKFKSMLSLFSKEPAPDHVSSSTLGKLAEIVDQANANKDRINSQIMNIYTVQKNLAISNGGSIAAAVTPVLTAMLAQKPGITKAECSFDEPTETLTANILMLGVNVLKIQLDFRNDKVILGSGGLRSFVADSSEIKQLYNQKFNCCGHYVLKYRNFDTEISVKKKMNFERVLWIVNYFGVCLESGSLHISVTIENELYKMQSYGGCSLCGGMVIFHHNKPIIVGDPSYNTGNSRTVRFNSKQSDKCGPILAYLRLWNVDSGTGVKLPYDPPVGRGDFDMFEGDNVMAALVIERVLKGPWMMAAKLKNMLTNTNQDLCNFYDNNSPELFDSLKARLESNGFTNFNTNLVNEFVGGTRLEFNGFTNFNTELVNVNSMDLRCRPILCTLDKRYLAALMDQDNLIWVTQISGKPIHTPAGVTRVSNKAFKTMAVRQMLNRLEFKLTNTQLSRDKPMGAPNPRGPLLKFMAQHEADNDKVAVAARKYKGQTQAAMMKLKSRRMYLTAWMVNGNSEYASNIMQQHNVITTSTNYPENNMLGLVDLYVAQAIHNTGYTSALYITNNACTAVLCGHWDWFSCPPDDGWSTSRFLSSTHDTITNLADIKSILDSEIAKLDKQEELSEEETAVLKEKKERSERIHNQILRTEDSWYSESYQNVKRGTVIVSVNSCGISTESIEKIMETTGAMEFLMCVPTLTPSDNTTAHRVGVTGSNNVKITYPGARNTLTPNPEIVYCMKSGKRATVQSQTKKDFDMISLHTTTVAMIASVQILKVTITRFNEHAMPKALPIPFSPFSHQSDIEKVWVQYPRFTCNFGDGSENSLIITKRRKLVSKALLAKMNERALRHDSNLKDLQAYGRSYLMTQVYTERYVNVINKNGLDELEAVCIAALTMKHRINEQLEHTMGLMETFRYVDTDSITDIVVKSCKKNLLEKVMSIANTMQEKLGIPASFTGLLDEIANTQRVVFIDERTNQSRVWSWDSNIKHMSDEEGSIKKWWASTADNLDWMNIGMIQEYRKVLCRKEDIPKKTKACPGFKQVVDCAKAVAQQKEARKTDPGARVLVLEEPIPLIGNVDITRAATQGTMVTKNENVIRSEITFRARQSIRRAQTSRLRSYLDNWNEMVKAYSALEAGDLKVMVRELMSRIAIIKSTSTPTWHLKEDLEAMLDVPNLTRAEHLEITKLIGDAVVSRWEQSKAEKKQNEYDFIKSDLGLSTLNDHDLNIVLSLLAVDRPSKVKKDLLTNTLGSQMSVNEAVMLRRKIRQQWCESASNCGQLVDHDHHANSVSTTEQNQGKLNILSLLHEEAGICDINLSDASPLKIRASSYLPEAITTCVQTPGMYELTSPKVEIIYEAMDNDECVWRCIEKYVTQNIEPHFRITNGLRAIMQQSKMLTESQAIIVCQLLGLNCCLIQNGETGTVYNFAPNKPFVQLMRLSQDASYDHCVLINLLGADGVKRLSPENIAKENMEQLEHVCPVDNKPIVAVGENPYACVSHVHIDNEDLARLTSCSQPYEKIPVLDGRFEMLPVNNVMARMTRKTSSATLLKKVTPITTGAGSLALTRNYYKATPMVTTKPGDVLVVLRDHCEKKVMCTHTTIVDTPGGVEQILEITDDIGDGAVCLDLGLHCLTPADRTPRRDRPVNTSNEVWSLNIETQRYLEATKGLRSHVGQGEGKLHIYHFDNREHHMYDEHDYIDAMLDENIVIELDPTVQVPTGVNIVNLICIRRMFRLAMLYGIPTWVAYCDDNPSAAQLAWFLKYYKMGHKVFNNNVTTEDLTNTRAMEIINALFSTYQHTTTNHTTRVHLRNKAETILSKEKVSEELFNTTIDISVFTAVLMGLENEVLKSNQGTCVFDLIPETPEPPQLQDDMLESMGILVDIKQCAVYHVPTGTKVALRVVESLSHEIACSTKVKGVDPKDDEMRAGASNLTQSVPASDKADPGSSQLSSCEENMSQTGTQPVACVHIEPCDHAANASNDDVLKEITQPEQNNHDIISKILATAQKAKSNPEDKSWKSGATSADLQAIQSLCDSPDGMGSQVADQLAKKLEVMNFSDEVTLSGIHRQRNYVNSQGKYLQRVDISERWAITYKGIGEHGSDVPTNNPGWWWLAFPPMRKLGVYKEKHEIKVTMNYAGNCAYRLNRIKFREPKSVFTHNVKPEVMLDILTYTSANNKQYPTNLQRLADKYLHGRVSWHVVYGEGYNRDFLQTCVELTKRMERVIVVTDAPDVYNQLDADIQVREKIITIKVTSQPEPYRAIWWRFMILFANIDPECELYILNGREMAPNDMELVDRVMEESFEDFDIVSALHCQAFNVCCGYAKYNHAKFTDYNTFNDIYEAYGNSYGGDEIYMSRYKVKMMWLYYILPGGAWYGIEGKWLNYALDTTICLELKEGERTRIDHVKGLFCSANFFHVAPDTKGIYDYSTVDWSVDGIPWQYAMQIINGHSVTENPVRHSTGESTGNPRNISNDGEKPWQLNPNNWLLDPGLKKSEKMKIQKFLDSDSSVKCIKESQSLPIQLGPLKPIVVFANQACEAIGVSMNNTGTLYVEVNIAQQKLAARNEPLQHQTLILKSHLTLMSTTGRHASWKPEYTHLMKADLQNCQVYVEGSATSLLQWKREETQHAQVYTTEERDVFVRIPQALDHSVGTLKTLEVKVTGNELGLSSSSGVLARVLKLNDRLAWNHWLETQHLQKLLEFDRRIISSHEESSGMTFKPRIGQTLYLADVLTAAGIECVNHITTTSREWKEALKNPLTKVGIMPLTNSVLVSGKLGCVQPTIPRCYAMLCQGVKLKIFKPETRGGGTPSNVSANVGPSNPTTAGPGDTPPLITSWNKWVESGASNQSPFGVSAKAYQDKLREKKIETPQDRLRVLETMLFDDAYALMSHGLTDLRKLNDGGNWHCATDATMKSDFEIIEPVGGDLLPSLNTSALRHNETNARVIDLWDDTDLRDWLTLYAPKNPMKLTSRVSPGQGKINLKTLLTNRPCQTRPVPTQVMGMGENAVTGRLGSVLPLRREPMNVTHELHKFRTAYYRDGWERVLKDFKANTITISDADVKTWLSRRSDWKALATSTIKMLETGLPSNPMNAVNVHVKTESLLKANPIMYWRQTQGRIIVWQPKELCALMSPAFIAIKRRLKEVLRDEIVYTDGLTPDMLSARARTIQYDYVFEDDLVIQDRQTDQELIDLEFQVMLDLGLDINLANLWRLVHNKWRFKGQHSWGQLDAMRLTGQATTALGNAITNLCVHSSFVIEHRQAIKLMFVLGDDNITFMSAEPNLTKYKRLMSERYNMRSKPQVSRNVGTFCSLLCYRNSFGHCEVGPDFVRLRHRFEVTGGGNHYELPVVAVKMPHNVRIGKTFFNGRYLHVMENEEAEMEPVEWLRNHANRSYILVLKTNSAEWSRLDGVQVHDLSKIDTSGNLAEALEGIGASMGMPNPMMAAGMSYLHMLGKSEEADKINTEKEFGLELRKWYDVASCKNATCIKYNMSPMELEDNIGELLKMIRKPMAYHKRFLTTAAYSAQKIR

SEQ ID NO: 1310 - protein, 4785 aa, Winged bean alphaendornavirus 1
MACRKDEHREFIQFGPECLVPDLNHIDTATMRNFILLYQEGVCHIAANKLTNKMVARNSHLQNEEPFWGPNMRDYYSNKLPDDICPFKEDANKDLVALDLILRIIGRHGGSLAEMNAKSARLNPDMTPHIEKFRNKYKVRAMEMAKPKAVWLCAACNTLNFVWLEDEQTGVHGQHCGICFHALDCTEMLPDSVNNNSLKIDDTTQIRVGAIETQQLQVTNNTDGAPDYSAATLNTLIEQDMKNMRSAMSRRIYKVVYVSNGMTDAQLRYLQTNNLSFTIVVSRTTPNPHAMLASERRMAWYNFVERAGSDQTVVDIGTRRNRDTVMCPKWKGIGPCLDWRDQERYGVKPLPTNVCGHTIKTCTCDIPDEPLMVAIDSLYDISAQDVVQFMMKRKAKHLLYCLSTAAINFTEMYGSLYFNQGEWYKDGSVLVTSLAGDDRPYMNSWYLTKMWSTADVIWVGDDVLTIKTYMTIGNHILRIATINETCAADIKFNQVVKLKHNFIELTIPLLSQDSWLAPTSMPILVDQRVNIDVNLYHALYSRNLTNKLSFEKMVEFGLAFAHMKYTTAAGTYHNRHLTASDVRVHAMLAVIATRRKHGWIMQALELNEPSNQIGMNIPAGLMHSTLEYCISVFMQWCKSRLAEFQPGNEGWKSKLTAAITDWLDNDFWIELEEMTKAKDDTNLTEYRNPIDLPCADENTTYLCKHHKLTCDHIAPLINACQCCGIAECIDDATFCPCCKATECKHRCNHPCLGSKYHGKTDDAAENCECCGVKGDAIRCQNCIMFVEKHNSAHQPPLIETQSVETQSNLGRKARARSTPVTVPPAVTQPVANSIPEPEIVAHDQPNAAIGMTNVNTEPVINFIEQWRRMYINPHATEQGDVNDQNDGDTNANVNNATHERDLDDQQHIATDEGIPRIPLHTTPLTLESQVTNDLSRIASTEYAAIVRYGWNECFRVGILRLPDFNPLNLVGVSEFRFCPMGTSVISTDLIETISVAKTKGDGLCGYYALKRILGDEVNIHDLRRLAKKKDWFTNEDLTNYLTSLGRNSVVITPGNSVVHKIDAMSDNFIVIRSTTVDNAMELHWEPANVLQKGLCDTFPIFEGCGDAKQIQKLSMKWDIPFEWMTSPLLNRLYMAIELIKRNMIECKSSKVKFCDLKLIQKDNARWLTNNTEHIHEIHSGFFCFQIKDQFMEMVEKLTSMVTLEARHTLSTEVYDVHKFQDSVANEAIKDLVTETCAELQKIVHEANNLSHFQKESWETNLVKTKVLSDGRLKVLMTDHKLKTGDLVSVTTRAGYHASYVSVIDGTVTLETPPSVTSIRPVITLNIPKTSFKSKLILLMALQRKTVTKELMQRVLSRSAAVLGPGGSGKTTKLIEQLDNDTVAVARTRIAVDTIRRRAPQYRSRIMTYEKLLTQPRECKTLLVDEATMFNWLDLALILPPTIERLILFGDQNQVGLIDSAILGGTRYLEPVTTLIRPPNITTLDVTYRFGQTLANLLTNAGYKITSLKETDTIVEFVRYDSFDEELIETLVKTHRPDVVLTFYKQAKVRLKRFIGITVETVHSYQSCEADTVLIIQWNTGSRHSTIWMNKAYCVSAATRARKKLVWCTIGLSNRATLKDILKGNTVTTITGGARDEDLEDKLTTLQPSSLGLRLADLDVSPIVTSGLNFENNETPVRWTINRRPTTKEINYLLTTTADNPVNWYGYNLEQIMDAGKKETIPGFTWNIVGESVVAKTITGWIAFKLSNNGVRINIEYSNRVMSMLAKTKMEDAYVSEMSNFISENFISDGNLECWRRKLTPELQTFVLQCFKEFIIEQDDEVFVDAPETLDDLDTITSTSIDLELQKLTKSPQNVECEMCLNYPVMTGLLADYVQALYVNQTLTYTWQEHGSDQILECMTMEGVVFRVIVMDCGLKLKVSFDGTFGKITKHINNLVTKWNEQVEAGFRLNDLWQHLTLQQKQILKHRYGDVLEEVNSLGDTSMSVAKALEVIMEQEAAKLTVDLGASDSTTSDSMVQESKKSEHHTMYSALNTHFCTEADSWWNVELKEFNSIHVESYQIHKRKNTMIRLIAEQCQMLETCRIGLTLNLWGMTVTVHTFGGCSLCCGLEFLAEEEVILKISPQRSCVRRRHVLINTTVDRELTAAVCSFLGIDYEPVETDVSHLQPIEPETILSPLLCHPNYELGMIFERIMATPLNMWNYYKTLGKTAKLCTYYKHYNSQYVAQVANRLGPKYELAKNNSCGDHAKIDGAILMVYEKRTKKQFLCQLVNDKINMIPNDSDDVDCDAVMEMVNNRLKLRLASIPWKLAKIVISALHLQTVTFGTQEGHDIESLNLPLSYHKANKTMVYNYYVNKTEAMILANVKKPHHIVFVHAKQMEKYVSLLRHECQNLPVEIQNYSTIEHGFDQMVEQLHFKYSYNGLGYGETAIALSDYPYLSMLTSAWAAHIRPLSEEHNVRYVRNLLDTTPMLNKILSVYGPEKKNPNHDDDNTKYHNIIYDAAKLQRDLENGPWFTRRLSDASPLQADMLWLGLVALKLTPEQLYDVVKSGKYESIILLCPIKISADNDYFKLISEDNTNYYIAYDGTNDVTVVNKMLMSAIMGGVNIKIDDVSMVFHCTNNVLGHSTIKLTICNKNLTLPRYIKPINQQNNIVGVSFRIPVINDIRRALRNASVVQTRKVTIDHKLYRALSLRMLRPGTKLDDLLAYARTYAHLVTYSNRGVSQFSLKQSDYLMEACACVYFESIRANQSITKLTDILTKSYNNKWSLKNLRNTVEAIGLNILSDVAALFGSAITVDEILKTVESMLETSDLTLVRNLDRFCFVKLTKDIVEPKVVFKTSELKLSTGNAISQLNTRLIADTLISAGAGLMHWYRGLKTTPDTNRNHPTRRESCVSSMCRIVETQEGKPKLDAVLRAIKHMRKYYSHQAILQAAETVLKHASDPIQLTNRPNTYEQLSNIVGVDVTGKAEIKPTPRVTMMGQDDIAHCVSTAKWMYSREIESMHGKTVLFSTIGSMGDVEPFLGVAQWWKNFGVKSIFAVPNDLVTHVTKLGFECVGLDVGVDEIIIECINMENYKYNLPKLVEHLHNLMDTTSRVFDVNIKLWNQIMPNVDLVMETPYTHVASQLAQKFNKPLLLSAAYPWEYHRFRTIKMKPFTLFDVMGGAISYAPFQNKLEKWRSTVLDLTNQRGKFVALGGNPMVQLHEHPTTVWDLSYSSTVIGYPVQTFMEQTLGRQHEIDALTINKIAAVCFGSMVDTNFTRWMLPMVTKLSNLFDHVIIVGDKWRLEPGTIASNVSQIGYVNYHQLFPLVDLVVTHGGSGTTHNALRHGCVVAIQPFFGDQFAWLEAVEKLGIGMHVNRIQHLDKMTFQSMQTNLVTYIKEIGEYDVEANLISSFNYYIQIGAKHIEGLATNVPWPVTEIFDNNHDKLTNIKAQHALSWVDLEELGDQLKVVVTELGKSDVDDCQQRDGVVETTKGEHEGSTHNTQTDLQRNEFNRFNTVRGTTGTSNQCKQSSPIEGKSAIHSKLNQHQSGKIFNWKLRNSSETAKTARQWIMQHKRNKQRKQTKINKNTIHSEMPTTTQLNHRNATGHAPTSVDSSPSNVDVATNMSEIVSPSKIVVEPVALAKGLANPGVVKKLTFPEVINCKANVMGNNHLAHVWKLRHIRSEVSGINETNCGTTCRIEPSDWTQLYDPKTQDTCVHECIMWISKRYGHNISQQQLLRLFAVAGVKGRPTMQQTKLLLLVLGLPVLFLTPQENLALNCCTDEVDIGVKLFVSNGTGHCKIVKIKKTILIEELRLDVLPKKSDKLQRNIEEYLSAYNIDIETLKNHMLCDPTNIKNWHTAHSDYSLEELKHKLKFVNLKHTIKRSTQAVHTGDWVQVDDIYFWYGGSLDIPSGVLLLYRQNSCYYPAFYFASDDGAVMIPMQINANNSMIHDIIQTEIKVVKEIKVPKTVRHVTNDMGTVTCLNQFTRSVLATIDPTFTMATVNDPDANYLYIYEYDGRTHHKYDELQIILRFDPNNIIGVGFDFKPEWVQKLKNITAPVRYAVYGSKLCLALELNSQHQADVIFNLCSKTWSAMFRYGDVIIAHYESVQGVGELWWTKIGKELNCTRGTSNLHVNWLSTEWFELDDEKLSTLGVSREDLESLLVQTVNQLRFRVNDNFSFEEVQYEIYPTLPVYSMSGRRLLFPFKGILLEYQPHITGGSTPLEERVLSKLDSELKPNKLSRWWDLNTEKPQTSFDMSVWEQRLNTEALMAALSTPDMTVADLSNSNEIVLDQLYIHNQPSEWPTVSLTDTQADEDLDWQDLMFWHDTDLSDWNEKYAPTNDTQIKGRKLPTELKVSSKTTLVEYPKYARPVLTKAANQEFNAITGRLCKVETYRKYNYDIKEQINLFVTTYVDPNKLHLLSEFKQNELTMNDGKVLDWLRDRPDANKIAEELEMILAEGLEVHPINDIKVHLKLESLLKEEPATHLKQVKARALMWQCKGYCSIFSHIFKEIKTRLKSVLKPNIVYTDGLRADELSSIVRNVKDFSHFLENDLVQQDRQTDHEVIKFEMQIYKLLGANADVINLWHNCHFHWKYKAASAMGIRDAMRLTGQATTAIGNCLTNLLVHMKLVKRLGSQLKLFLVLGDDGLMLIDGMVNTDSLNRELKVHHNMMCKPKLSSVVGTFCCMIVGKNHLGGATLGPDFVRLRRRFEVTNGVSEANDDNLRARSMSYLMFLGDIPEVRETVANKKFSIEPLKWYDYDSAVYATASKYAISETEVENNKLQLLAMINNPITYQTDVLHWYEGK

SEQ ID NO: 1311 - protein, 4580 aa, Yerba mate alphaendornavirus
MRRGKILNPSTEIKNNLYGWCQLPRNYKVTINNNKFIENLEGIFKTGHQDVDGDVLYMVPAVRGMLIPKHKHYGIASCANTKDVMFNKFDMADLSPLNVSKLYYNVVCLGNELRKLNNMSLQFIIDGIRHKDLIEEIDFDKEFVSDEYLDQRPVISVTYSGQGNCTDEIIRAIDKEINKFGGLSQYYKLHQIRGVNDPSILKSHLPNLKRCKEVDENGKVSYKMEFEHGLFNPIKKCNICDKWNHYSSLDRGLRQVHYSLAKYRKKHKVLKDKFETVKNTDDIKYHVPWRCGYCFSDLNLKVEITMEAREYIFKFIMENLFVLHGDIEQLLKLGYGDTYEDLSMDEKKSIKTDDQRTIREYFFHLQKKIIPVGHDFDKLMQANISKNIGGCFFRATSKYNGIKPELIAEISTFTELVKTMMNPNHVACIGDVLPSKNDDKYHQWYKNDHWFCSELATGCTSSGVCDHNNKFTVFGSIGALNMSLNLIMSIVKKQRQLQIIIPMRSSSNTLMDKTGVFDSADGTLNLFLDGDPVGFKMKADTYMTLHDYDLIVYDSELYLITETRRLSLTKLINVTGPYSRKSQLPMLAIDHTAKQSIRLFLPDVNCFMGNWTGMNFREQTFELNAPLFKYLCLRNLSGQVGHNTLRQYAVGFAIRRFVIHNKVIANPTIAYEQVDIHIILSRVCMMKLRGMFSASYAYSKFTKLLGPFRGLMGDVETAITATLIGLFAELLSTKFGITLDHVLNLFESSSLKSFITGICDTRLWDNLLLMAENVKFKDLKIINVDDNIYDTNLPNITICNHHGEKCDHVEALIFNRCKCCNIKTAMREFCKCCMPSPADNDKFFRYDKWVDSDEVKTGKETTGLKLEISNNAVNEYNAYKNYMSKSENEPLLKKMISTIKESEVKQKYQDKNEKEENELDKLKPKKVEVDKEGDRETWVDLFTNKARKAIAKTKKLLTPVVDKAVDDMRDITEVDILTKLGYEFVTHVEEPVKYEDIVNSEPSVNYYLPHCLEGVTFLSRDTFEIIEVINLPNSGSLTCGYDAYNYVSDVPIEMKSFEKLCGGQPPFSQINLMDYAQVTRENLILVCLNTIILCKYDLDDDYFKCIKFDEPENVNEIGHFSPTIIRRKLRGSQYFAYKYPANSNDRTDILRTRFRGAITCHNVGDITAKENLICELTFYYSMNQLPANNIVADVEITSINDKMYLTNNKETGIHSIESDRIHVMIPDHIKPLADKISYALKGELKMTDLPEFRHTAKELPNNTEEAIVEQMNEILRSIVRIRAMITDRDTANIRQVIKGYVEPWFKYSKFDTHKSFITKLKKFDLVILKMDNKKELVAVVGFDRGKLILDKQLLFKKEVTITELKDSYGSKIRELIGYCQPCLKMEVIKEIIYNAKFTTGPAGYGKSTKIGELAKPGDVCVAMTSSSVKSLESKVQPGVVVLSLEKALYTHRKCNETLYVDEATMVDWLAIAMMVQAKTSLVMFGAENQIGKIDMSRTPGVRHVINIMDLVSDKNITRERVTYRIGENMRTLLEDVEPGLISKATHNTTYTISTFDDAEFDNIDIAIARCKPDVVITPYNYNKIRIEERITKNPVLVVTTHAFQGVEVNRAMLVLRANALGRWELNGMPEYLNSGLTRAKNHTDIVIYGYPNPNVKSLRDIMTMVAGLRLWNANQIEAETDDTPDAIDFNDELTEKTKIKNIHKLTVQEVNLLNDMNLAMEGASIHYEKIENGTIATATKFLITIGKVINVNGEVTIEANNTIKRKIEENMDRTLTLPDAVSYNKIKNMEDNNVMLSSRSAAKIKELAWIVDKTVDGMLRVRLDGSIICITKTKGCPLFAGLTFKSGAETLIIHDGWKGIMRRNISIMRNRIYDSLSPVVKWLDLKIPNVIIREEANIDWLKHLTGDLANAYWQLKERLTNVHIWMLNMFAMDDVPKCYMNNMRNVALYNKLARPLNIELTDEHQSVIPHQTLILEQSKLMGYKKSYTLVDMKGAIMEVSIKSNVKTWSAFVIEALQDIRKNGEEIRGISVTDLNIDGLRIPLSKHFAIGTEIKSLVYTEINKINRLIDSGVHDLIRIDKQANELYNHIIKARFPKLTIATSNYEQISSHVESILENIMLNTIGRLSKHSKEVAVYGGPIPLTVCQQGKYYIKIRVPKLEEPTRYMYDIQLPSVLSKLSHFNLMKDEENKIDPLWNEESCHRLMLGCDIYCIEEELLIELMDKSEYLYGWTPILNNNGEYFQTNSEHNLIGYKHGVHSKQIRNKLIEDVELGKPIMVNLDKNEYVEANIIMEFMDHRLVKLRRRVIPDCRYVDRYIGTRQDISGEVTVRVPWIDFDLMRIIGEKKIVCIKELKVNRMTLRNILMRLMTGDDSESSVLAYTRTLESTQLITDKGIQDMNTGNLLVALNTSWYALYLHNDYITKFKMLINLVTSCEGNALATGLVESLLPGLLQMLGKVSEKMSEIAYEVIKNLNSNVNLVNSMMDVIKENEKMNWSMDYTERRKNRYYFQQDSEEVLKGWINSINEGETHEPEDDEDKCPSYDDKDSIEGLSENSSQSYKFDLKEFEEDIKMEDEDESVYLSDINERLSEENNPEDEMVQEQKERIDDEWVKSSGEEEIFEESLEIQEETEVIEELIGIEESEPKPLRRRLRKKFEEPEERGIIDDSIEEEVSAQEESASKLIEEEVGLQEESAPKPLRRRLRKKFVESDEETSEKDSIKEGLLSDEEDKEPRVKEEEEAVESILMRNINKENLAPRVDEELWRKVIDQDRPVKAPLLLEQNMKCIPKIFWSYWHDHEIPDMVMLMINTWQMTNPNYRIIIVTEKTIKNMVSRTKYEELERQTTQFKSDWIRLYILKVFGGIWIDTSTILTDSIDEFVTHTIEGESGVFQISLCKRNNMNKTFESWFIICTKHNDLIKEWYEVTDAMMGRSESNGDGALEWLSVKYPDIYPKIIGSIVPNLQKYLRVYLTEKIAIALTNGIEPSCITEDEGEVSLFHKLPIGDWVRLWKIFGDEEMSKHKVTIPVVKLIGKMRELLMLDYKYREPVKNSYLEFCKRAPALRYNIFNCSKLTITDKVVKHKEESIVISCHKNTKVLLLCSGTRGDIMQFLPIYDLCWGLGVQATIITNSDHSALIGDRQWHKLTSSSTTLMALASSVIEGKDVTKTTEAVTIINLVKKETENIINNYKDMKPLVIMNNVYPNKKNIMKLLNTKTIMMSTFPEEWVVTKPSSVTEDSINAKLIRLIYSCMEGATYEPMVIGKMLTSYEWMTREEHYQRVGPLTLYESGKREMNLIITGDNVCVITFGSSDILLESKSICQLISRVITKGYKVIYNDINNRNVPQSELNQLAYNYRGKIILVKELNWVELMDKIKLTICHGGYGTITEVLHSKSKLIIHPMIIDQHFWADKLQSYGLAVTLNKIDDEIAIENCLMLAGKTDLALKNLDRMLDVNLIELIKLIKTNTQCELDRINPGDSLSMIWDDDMNERVDNEIIKDIKGIKRLKMVKTELIINPGVINYCVKESILEALNENGKIKFLTSNNLGVTNLRDKGVHKGNLINGVLCLGCNLCLVDDLGDALIINIYDAPVITLKVDSQRSVWHCSLVNIRHYEDIEDLTFDALCQPLIDDIVKDIHNEWLSKYTVMELVSPEVLMSHMPKKRRLNIHYRIVNDNLNQLGARSDPNVLYLTLYKYRYMFITDCLTSDRDLSLGAVTASEGWRLVNWCIRGGRMVIFSYDNLPENVVFVNYHVKYEAPVRPSTTIIGKAKMYSLNKATVRHNEVNMLAPRSSAIVQGTMKGHTLIVSDYDNRSHHMSDERSLMSEAKKLVIHSDKPISLSLLNKSYDNSINRMILRSGFVMYVTEIGDERRTRIICRKFKIETVETKNVVMQNKLEGVAVDYMLKFFDTYSNKCKAYDNIDDDLLQLRDWDELFERLNNSLVLTSNDKEKLNEIARKRGKKITIACLTSVGLYGTKNSNIEEISCNEVILHSYGILVTFQSMGGSQQEQEQQWWKILSKKGESVPGDWWALRKQKQSEGKCPDLSDVIAYNTMTIHEPDQNYVENEVTAWDETSLQIYIAPYSTPYTGSAIEPLYDLPDLPSMQLWDDTDLTNWVTMYAPVNACEIKSRELPGKIIEVEKIVMSKWPIKSRAVLTKVCYEEGRSIVGRMKSVVFIRTMIPNTYKTVIELCETYFKTDWRYHITEYRNNRLIIDALDVQEWINENKDTDNIIREMLETLSGEIITKPINDVNVHLKVESLLKSNPITVSQEQQARIIVWQRKSICAIYSKLFVKVKNRLKDVLNEKILYTDGLRPDEISARIRLCNNVKGFFENDLTKQDRQTDKPIIDVEMAMYDILGVHTDVIRSWREMHETWRFKSKNYWGQGESMRLTGQATTAIGNCLTNMQVHQSFVKKNFYNLKLALFLGDDMCMLFDATPNIKSLRKDIATKFNMQSKDNWCNNGATFCSMVLCKLPNDRAELAADVVRLKHRYEVTNGAHESTAENLLMRKASYLMMLGDIPGVKEVVSNLNLPVKPIVWYGYDTMLQAVADKYDMTTVQVEGYYHNLLDMMRKDYKRSIKYRLFGNQ

SEQ ID NO: 1312 - protein, 3470 aa, Yunnan alphaendornavirus 4
YGDTAFCDNISYFDTLSSIPDTLDAIFLDYDETLFPYDSSQFYKGAETKDKWNVFEIADRSENVFNLLLYVIERNKKDIELWMTSKNSNKHGLASTIGISPHTKIIENMMHLPWIIRPDLRGERKSKWHLQINELNHLKGKNILIVDNDEGNYSQKDDPNVCFLHYTKEVDELCSNLNVTEYKYYKKIMLNTLDMRWKLSCHDYTRSTANNLKMYGGELKEALNTIGVIKRSKFEINHFDIHETEILVDDISVLKSNNKNVIELIAVNIMCLFEGIEIKNHTKILLNDRCSYNHCLLIYSQLLWDIAITLFNHGEIDWIICHEVTRYMKPSAIRQDVKCLSIPESNGKTIVWKTYPETINCFIHDMRNSGEKDWEKGIKEVDNTKINVVNECMTADLGVVENVIVINATQSTDYNINWPDWGAIRSLSKSQMHDCNLAILDDYNSMTEWFSLAYGTKKPNMKKGKCRHCSATFVYNADCAHHGTLRNCVCGQPLVEVERTGIYSNKIKETLMFETTTEEPQYIAGFVTKADRFIYETKESSIWIGEKLKRKKPDWLSGIRSDLSFANKSSVSVRTIHSSIKHNWSHETYNSYLDALSKPLKKNPELENIRNSIIEKITKHKLENLKELYVTATSSKTMNTVRRKKDLTVWFILTNVRIENVKEDEHNIIIQCNLNNDEMRNIRIYAAAIMREAGFKTTMTNEEFYRSKCYMGSYSNVSTSVGWWTNEVEAGMVTISEDLNNTLLLIRIQQVWEELSNTYGLDEHLLMRHVIVKRKICGKEDCVAITNYHITNYIKVAEDAYIRKTNIIGNKKVYDIWDFHYKNIIVPDYGGKTVLSWIKNLNVLSMESELFEMGTWAVYRSISKENCTKILPVCHFGEYNSESVANIALLHKTKRLFSAKDSDVANKKIEQFKSAECHSKPDVWLRRILEIIKQYDFIFEYPLCPNCYEINRIHYELLSDVTVENCVTCGFKLMQSETITNMKNDTIRTALFDTIVKSRGERIGREIQLDPAECPHFARIGSVGPRTEPTKDGIFLWKQFFTIEGRAISNLYNVMNASSLNRIEHYEKSLTFYRKVTDKDTGRLYSKVEDLPKTYSAGEKEKGTIIEVITTYPSNIKRVAKNNGSVGTTTEFDIYILDESKVTKRLLKSLIETTTMDLSTAVLNIFKKQPANKFVNNQKAIGRGDFIVEITDGMYVSIKLDNMIRGPNGIGKSTVLKLIYNKYLKELDSARTGEKEEYNKVFVLHELRLSEVILIDQFVSRPNGRLANVFKNLKYRGILNKDKLKINLEKLDMKYEEVKNQRADEISGGQWARILISMVVSLNFIENYLILADEVESQVEERLRHKMLKMIHDSKARYLIVSHGSSMGMSEIDFLENTYDEKHFRMVYQDGLLESIGKMTRSAKNCPYHDLVDRINDFLDKPRPKNSKFKFEQKQIQMMMWCIKQVSFETEEKELKNSSHYDKDLFSADVTDIGYTNRDRNEYEKLENIVKIFKKEGMTETLKKALNEDLKNWDMSMGIVRVDMLLQHPIWTALHKVIKPSQIDTHNHEVFLERIGEAVGPGHFETLYGIDGRRKDVGCNLCNYRFLEAIGVSEVIFSVQKGWEKCLENRYNKDLSRQFDWTEGIDDMLEYLNKHNHIQLYGKSGSGKTTLINGLVNSTSKELNYIGQTMSTVNQTINQVLMVCIVSQLLVGKDPSEIIGFKNNIEINRNLREMSGGECMMLVCYITGLTSSAGSLILLDEALRSLSKDNRLNVIDYYKKKNIQVVLINHLEKMLPSLEPKIEIIRLQELVNIERIVNSEITIANIFRSKKIPEIESNTDDLLIGRVKIIKNLKDIYRVCDLYQSHRDHDSLPGPTYRYTNRTKYVDGQLGLFRISGTRTYKQHWNEIKQEWIVDKGCELTELRLVKMLNNLGDLFVKTNSNIAKNIGLYNDKQTLNILENQRHRLNYTIKWYTPPMEPETVSDVKNLNHNIIIKHAQGSKSKIMVFNNKTGDFKEEEANWLCLKVKETDEFYIKNEGSNFSCLIEITKGFLKLDDKLNLTEFPKYERRIDLRLDSYEHTVRDIDENAVELIKEIRFNNKTTTIMKERTDFNIIVKISKSTDREIQFNELVEFTDGNFNQSYEQCYIYTTSGVDKFMIIEDKKIILLERKKKGVKKPFHVPIRHNIHGHNCKNGHYYEHTHAKGNIKHRPYDHQCPYCEINMNEEKVASSLLTDPGDYNNLKQTEKIKISKHIKPNLEKILEKQEYYNRYMDLDDLETDCMVCCAAGEYVNDYFKIITYKDKKAIARLDHENIEISKKSDEEIIALLECIRKIPTGNEENFVVRYLDKCIDHNILTLATDEKPMLKIELNLQKLKIYEFKKENIVAESTERVNANYMADNVLYKIEPTNIYNALNRAVKLNCKFCTLREEKTSCFVCERDVNSQIAEVMKVKTITDLKQLIQSDEYTVKGNLNNLADFFQLKITGVASTQDTIKDAVLTIKIKNHPFNMKQDIVIFENFSGGGVNYTHDRYTWHLPYENKPNAISKWWGKSFESSKKRTGNYELNKKLKLENETLKTGYTVDAMRLMEFEEISEYPGPNNMTPELLSNDEGNKIPEYIILPEWNLMPVSASTDPDEPPAVVVDYWMKTDLTDWNIRYAPEQNLRIKSKQVVGNIMESIKTTLKETPGWSRAVLSKAYNMEFNAVTGRLGSVKLIRKENIIVKDELEQICRAYFRRPDFEDKINKYKNEPLTFNAEDITVWVGNRDDWKKIDKDLSNLTQEGFVKRRLDDLNVHVKTEALLKTEPVLFQEQNQARIIVWQSKDICAMFSAIFTRAKDRLKELSNSKFIYADGLTPDEISARLRGLKSKFFFENDLTKQDRQTDQQLLDVEFAVYGLLGVSQKVLDIWRTVHRNWRFKGKETRGTLDAMRMTGQATTALGNLITDMTVHARFINQYYNYIDLTMMLGDDMIIMMNIMPEMKPLRRRTEELYNMQSKPDVREKSGFFLCMLIYKTSTGVIECGPAIPRLKRRFEVMKGEKMSPLSVTARIKAIICKNMTIRKYLETNQPTDKMIFVEGTGIYNLDEWIKNHAIDNSVLMYDNPNEINHDIIELVAECVGENQITGIIMPSLGGKTTYIKHNKKLREDVNLLDSDEIYNPWDMIIKGFRPNTKAWEIEKQKRIKEKLDRMISDKPTFVFCHNQEEAKSYGADRMYWLMPEYDLVKTSADYIIRKEVHDNHRLQIYTEAKENISYYKDYDELWTMLDQITAKRWKTGDQLKIVCLPPTCGKTYLAREYPDKFVDPDQELINERNLNWLDEIDESVKNQIIQDWIKENKEKTNGKIVLLHDENQVKDSKLQYVNLGNYVATDGGDSGNEVRDYWHGVQMNNKAYKKKTRVEIEKILLNKHRLMGWDILKKVGTVQINYSDGPSLSEALSRLFSDLPENPILLRCMSYLMMLGKTEETMKINVEKKWYLDLINWYQPVECRSANADY

SEQ ID NO: 1313 - protein, 3400 aa, Alternaria brassicicola betaendornavirus 1
MEGQRININNIESGVRAPDSEFPRTHNNNGENKNGGQFVPHRSTAIEIERRSADGPALGYWAPSFTRSTGPSPSEIISPVVPMIDNSFESNRRMRDLDELLQPNWNNAEGLFLVVESTSSRLLLMESGGAIERLSSQARTRSITIGRADVELSPRRQRLLAAHVISPMAFDFSSLMAMSRSPVNTAETTPVTCSPAAVRSKSFVKLQEDAKAFAGMLKDITVNRKHLKTLSSQAGIDLTSSRNRMTYMAWMEQTTGSFAHITNGMKHIGGENIDHLVRSFLCGFVQPLSTFSTAWVVRACYDKLDPRMGFNVKPLTKAEMLLVAQRETGTTKFRCKISLFQHWINGTMYVGAHVEEGDDEVDLIDFHFDFIFGKSNDIEKVLKNHIIGDVATAIKTQQVRGNLDLHNSKVINQLVKANAMRDYQIPSNTSDAIVDALSLAWPNRTFIKSSNKADNGHAYHAANRDLVRENLVMRFPKSGLVVDIGGAYSSHIRSGFWNVHSCFPVLDENDAKRKMENDTGIKNYIHDTETMMQSSKSVVSADRREAVARIKSGKHAYWCHSKAQNCGMVDKSGTSFGVSIDTLFYMKPEDMVAVMKAHNIIYGLHAIIVPPTFMYETSGKLAFNEGQWRISKGTFEMVTNGCSGAYHSSAAVMKTWLTTPLFVGEGFGLYVRNEGYMGSHMLLKIMRVPYGTIMQHMVRHCLWLTGNPDEQIYNIPIIDPEKPVTLLWKQPFTIERLCVNSTMLSMLKGRLSMDECNWDQLSIYARGLRHQVYTSQTGRVMQFNMSEEECRFHMILAMMEHHKLMRQISPLIPHVENIGSKGNWWTQAFKVIKNMLIKMGRTFDPTDDEYLSKVMKEHNTLDEYKMSHVTVSEVLKDVSMYTSGMQSMSKQNNAAISYHGQNRINATWVSKLLDSPETNFNNPNGAKVHAHYHSKFKTDQATQCKPQLGCPHDHRGMHEHDIGREEAKRGNCLCCGILSPLFANLCEVCRTIEKCHNTSSTCKHQHNFVNEHCCGASDCQCVRNTVCICCGKRSLSSPCLLCDDYQPHEEADSINYREQIKQAGAEIFQNAKATTIKTMSQHSRPISDWAEHVEEMEEMEREPEIMIETTVQGGIMTEDATKTDRVRLLTLAEPLEATVTNIHGVHVVKYVDTPDDGTCGFTALEQLPYPSKLNMADLQRISHRDDWWSGNDLGMFCVSQGVNLLVVGTSTSAYYQGDTKSNQYGAIVHMTTISGEVHWNACEARIMSVNADGDRDLDRRNIIGSTAKDRTGKEIDEMDVVSREEFVTNLLAEKQWLSTFPASTELNRLMRTKLVNGMLEAESETIGFHSTNGMNSTKRFTADAGVEKGLPIYITDNRIPMNGSDKPTFVKSVSSCDDVMSFMSPGVKFYFYGFEMPTPTNAAYIVPDDEIQGLQGINNTVVNNTKNVSENQTCTLELFELQSCPATVVLGMARAHRRIDFNEPNAIGLDRKRPNWKTFVDIAISARNLGVKEVYLPMLDDDFDVDEFDALVLSMLNGRSLPHQIKEKRGKAVPKMVVQPLARKALNHLINNAGFADVDMDILNFVKRESVGMSKASGKFMKIVNCGSCGLRMLKITGTECSSCGPTFNMKVSDAFSEGEFIIMPSKVGVDKTSNYLNGNWPCTADPVRLNGACMDYWREQYQMGTNSMIEATMTVHENDSYHKKSCVVGSCHVKNGQLTIRANDIKECSAYEPFVVQTDKTWSWAFSMPDGTIATAARLDNGPVRVIGSQDNIGYCLVMACNFDSGRGCVTEELNQMVKGAKAFVGVPGGGKTRGAKIAYPKATIVTKQAGMLKTFRAEGRDAVTPAQLIARKTPTDCVILDEAGLCNYTDLWPMVGKVNQLIITADINQNNTSLMASNVLTGDHTSWLSGVQIEQEFFKSYRFGPKTAQWLKRFNPRIEGVNSNDKGITWVHTTAKRVEDQLKELVGRNVDVVLVPTNADKLKLRKITNIKIETMKRFQGQQADRIGVFVTKFNPALTSTKAMYTCLSRHKTECIVVTGPQTASLSSYMFGQNLDQVAGSVSRLAFERFLNLPGPIVFIIKLGAKITWAIQGLLRALARSAQHSYQALKRIMSELWPQSADIDDDLLYDYELERVLSQESRLMSQADDEEHDGSQFGPGPTIRDDATSVAPSDIELNVIDPTPELEQEEFKDSRTEEYAQMSARGLFLSPDQLPRHTTPKDLSDDVGGAKVAEWYTKTYLWSKDQTRQAIGKESRFWNMADSCANGATEVMTWIEDLVMTVWDGLVRFVGMMLQRTGRALKTIRRWFANVLSSESRKSEEAAWEAAKKEAEHNRFERVPETIAISTASDIGQMQHEAGSYKKRRPMPTKDKWLKEEAGSVASTRNPSSKGQASPTSVKSLVQNIEKGRVGRTRKSSKVLNEALAASSETRMEAENQLFIKIGEKKAGRMIEMNWDLLQNFDFEVSWEAFCKEWDADPSCTTFSKHSSMFKGKINAAKHEDHDYESIIIMTFSKHIVALIVKLDQTFVYCHDVQTAQNSDSVDEVLTSLMEDRAGAKSVMSMIYAALWGRMKIRIIYWQWYLRTWFDFSYKAMISEKIELDGALNLHEWAAKNSYLTILKAKKRVTVTISGTDALILLNGQGLSGTKGARPIHLIRLRRGSTVNEVLVEEIGDVRTSDYVRDTVKKLLYPSYFRRHARARSNASFGGAVDILGKYWSRLLGARSGNPVQLSETWNEIKHNLPLMVGQEHQNSVKQGRKYKAYHTIRDTNNLIDIDPVTARGLVACCIPSGAGKTTLCTKEPDKYQDIDDLMTTEDFADINDINLNEGMFLVTKRYRSKVQEWIINRPTKRILLCHHPEQVEGLINNVLVVIPKWDLGKAWSDVNNQRLIKCTGEKIGPSNHDEMETMIDLWAETRLRLSLRMGTYDSNEPNATAIDWFLNTDQTAYNEIKLPTNGSTKSRLPVYDNVKQHVTVIGHAPPVTRPVIVKYINQLYNSITTRIHGEVSYRKQVVDPVENFERVAKTFFKPGWEAMVEEFVENPVLPGYKLTEEWLSMKGDPEPTMKEIKFNILDDFNRMPYNKCKLHLKSETLLKEQVDRFEDQIGRVIVWHPKPFCAVLCPVINLMKERFKLLLDKEKIVYTDGCDMNEIQFHVQDLHPDKVIEMDLKKQDRQTDMHELENEFVLMTALGFPSYLMPLWRAYNENWRYKASDMTESWQVGKRKTGDEMTSLGNTFKNMSGIAEPFVRYNTERVLILSDDMIAFGRTDWDQRWVEDHLRDKFNVQCEWAGGKSGKFCQLVVSPVRGFGFIVAADIKRLADKFRVVKSSLTREDEDWDARCYSYLSLIGPCDATNITASKMNLPRPVQWARSWGLRLQANAEYHKVTGEELDRDVNALCHNMMYSGLEKRTFNVLGTHKFKTK

SEQ ID NO: 1314 - protein, 5673 aa, Betaendornavirus sp.
MQHHNQLTKLTMNANSNQNETAKINTLNYPPQGGQFHEESHEIETNINNSAPIAAAIGTSMPIMACPVSEALAKPQDLAKTFGDADSTEIGILKNSTMANDTLPVDRLQFTSSEPVTYVKHFRQASDEHKAKFGEFKINKVKGSITKILSKPKPEVPTIPNVVDAKTVIGGEGDCWNKLRFYDQWQKQIKLGKTKMNLEAAAALAATTLKADGPAHSLILSNMQLQEQINEIKNKLPHTLCGIISKTFDAGCFYETPESKSAKFFSDGYSDYFYIKINYINNVYCHLEDCTVDTNPANKAMYINDGYETLTDINDRLFDIPVEIEPWTTPMSTPPAPYTLVPGYDKLNIGQKSLARVAYNKQEAAKLGISVAEYQARLANAQLLEHYNNLKSQYEEFKTIYSKTLLESSVTSGDDLELVANDDEFKRYITDLNGRKRLQTVTPAPIVKVLETLVQKGGEDTNKTPSDQEPKINQTIEDKGVLTPDPNQLMQECSDMLIGVNFGNSLKSKLASAIGMTAKQLENVSEHSNVIIKKDNDLIAKAYVKSKYATILLPHNTSEKTMIRLQDEFGEFDIIPGRSEYHQHPYHSTSRKCITLLITRQFPSNTPVFDIGGNFPVHLSFGHYNVHSCFRTNNPYETAGYIDRVVRLAKAVATKYSNYKEFQNQQNKTVTSTEESDNLQLANENSYIMVNNLLTSHAYFCDKPAQDCHAAPKRGISFGMSIDTLFYVKPHELGVIYAKKRIIKATHALLVPPGFELLNGGKLAEGEGSWKKVDNMLYTTFNGVSQPYINDIETLSFYLYTPIISYGKFIVYCKIDCSIGSYVLINHFIMPFEKLSKAYNEVCLHTTFIPGKVVMNVPVIDVHSPISLAGRQPFKMNPMLIDIKFIEELKNRLSLPGADWNDLITFAGNLIGTVHWTSAGSNKKWDLTSTEVKNHAILAYLFYNREMEGFRPLIDLAGRQVHWDKWHIHVLNSIKNTLTSIVKDLDPTASQMLNDFISSMSKDEMEPTKVTSEMLDTYKQMDAQLNVSDNTSIALSNLVEYNLTNCPTSPDINTLIENLHLKYHDGKNVTVHVNKMLETALDIRPLLCNKLPECPHDHLMPHLHRFNVAEYELNPCSCCGIDSDTTSSLCYLCRTDWPCRNAAESCKHTHKNLSEHCCGVPSCKHGMAHRNKTCSCCNIASRHDPCYACLEEQSDDSSSSSSEASNYNINQPHDDESDSASTTTDVFDTKPKPTVNKHEPKTGPKVYRNPDGVKVRSVVAPCVTALGGHVHSCGLCGKQYWHDHKFKHDKHPEFVGDCPHCENSAKSKPWPFEPKVEKDNTVVNEPSDATQTQPRGISKNIKDDYHVHTCKECGEYYYHSHYYTKDDHHIIQGECPYCSNQDIDGIKGSKFDVSISSKSISKVTRGYHSHTCGHCKLNYIHAHDEYYKSEHQHNIDHCPFCTKQPTPLHHITLLPEDTYNEVYKSVRNLCLLLGQQSNTMEMMITLHKASFGEIIADSYYLSSTYHVYHNEFVNRNPMLKDLSGVIIKIFNTVDAAPLDVELDMERITTTNIMNNQFLTSYGIRTNKLDPAQVGTNITKPWRIKHQLPLFDPNTYEPPALPVAPVGDETNEWAAEVVETNSNKIEAMSVNVNRDPIVGSESGLMEQSTIPATLTRTVATTPTKSQTMDEEAQQTLEQASNVDDGVVDTTENENQEEPEHDGSTVSDDDDDYDTWREHERDNETDYDVLPGITMSLGFTHMEPTLTKLKVTPTSAVEDVFRSKWFGYKDNTGQGDCGLLALAHVFGDELIQSYRHCLNKEQSEWWGMEEFVMFCNICHVNLLLAIDHYKVVLICGDKQSVSHGSIIRTKLFGGEDHWVAATADIIELNANQTFAQINRTLMKTNMLLMTNNEIKTKLTGISEQVVQHHINCFKHSDKLELAVRLGGVINSEGLVHNSSKFSTKLQDYIKKDGKLTIFKHPTGWGKTTSLPTHFKGKDITLLTPSRSTIIGSYEYIGRTYNVSVTGRAHAKDFGYPSVKYKQVEYSTKEGTKTKAVLQLGQYHMVTVDSAYEALQHGYPQYLNRLVFLDELHAMSPKYYYVVSKLKSVYAVMSATIDKHLSTDTKYPVETKIVNNPSDYITGNDGEFTVVKGQRDGSFLTRQYHDEDDPYTYISGKMISQIDLNTVRRGCVTNAVTTGTTIPNAKVWIDIGERYTIDINVLASYNVSNALNWFSVVTYTYDINEMMQSRGRVGRTQDGIFIGQMPVNDKPLTLTSVIEYCAINKVIALPRDRHLDVITVGKAKMELPTDKDELIEALRNKDLDNVDEESIAAQVEAGEITQKEMDMILELNIEGKAKDIEMATRFAEYLLPRIKLVSDLIDKASKINNEVVDYNMTNSKLTRDAIGMLTNVKPGAKVKHGTTKPIIRSVKAGANIFTRQCDKCKNLTIDIQQECYTCRFSASTESKFLKKYKLHSANIMNPLALAKTTLMSHDVPKTQDEAARLDEICFVNTLNTLYMSLNSCRMASLNWTNADAGYGQSCHLIPISSDGSGHFLVNVPKIKTLQHGEIGVIYSEVGSRMSLAHYTGKVGGKHDFSTHPNIKGIMALYKYSNAHTLPTLEMLDKRQVPNVDRYNKRLKMMKIYSGVAGSGKTWHMENEKTTEKLSIVTVQSGMYERFKKRYSTPRHLMTGMYDKPMFLIDEFGLISNTDLWMMSNDKVCMAAAGDLNQILPSEEEAGIIPGQHFSTMGQVVYDGKISKRIGEKSAKSITKVYPNFKSEGPKPFDEGITVINIGALNKDNFIGAVNGKRVDTILTMNTQSVVMVNGWLSTKSDATNINITSVRRSQGSEWPHVVVLCDGTHVGDLKKILYVAMTRHTHSCTLICNDFATTQVASIGLTNTRGLTMASRIKSQIKVKERQSAGSSSTDIAELVHLPFYEERGPYYDEIQFNRALNTPIPDDEILTQEAPPAAATPKRGAKLVTDWYKNIVLQYKSYARKHPHIIINFKRHEDTERNWSYGQWHYNSGDQPNVEPTRAFDLVHGEISEWSGMSMQDHDRLIAMSEIRQLSSSNIMANLLKPFMNKRIDYDPLTFVRFNPRGCRQLSMSSVTAQEIIMLAMSDGPIDHSDVAISACLKNVQTLRLLGLIDSITALTVLSFNLMACGIIISVMDVDKLMMIDTFDYKLTDNERLQSKRVHIEMDFTQFMLNGTLFKTMLEREGHNTYMRYCGMIYEFINVETTKGRTVDSPHGTQGEFSTRNAQLFNFTVKATTEGFVDSNLNLYDERFLLRFIAQASDDICKLTKMGYDNLIQYTVELGHRSVDLLRRLATHAAKVFRFIIHGISSSQTYLRKFINSIKRMYQRSAMILTSLNHDKNLESNLEAMSNDLEQNHLHTDMCENVHEIDNKDYLYVLNEDGTKTKHAMSVEVALNSDFTCTRTTNILALLILGDLSYDKLDSHDKLLIDKLIQIMFANLNSCTVNESWQPIVDANSDKLLENVGWLSDLSKLAPALGEESSHALTEKIINNLNEMNVTFAETQLMSTTDLFSINNFMYIYSSLPSEFFLNINDENLVRLHEKYTKCMITNNLYNPYESMCETTTLLTDEEITDMNVKLSLIVNMKRDINQGSIARFHVDMGQIDGIYEELMTCGQANPNQFIKFNTLSRLLTKLKSYCNNSELQMVLTKCKLKFGNALGMLAGCIQYVWGGKEHVIKHLTNVFKTKPHALVVLFNAMCDAIITSANNALTIITKALKQIGKLKVSALSFLDFALLTNETMATEFTGLNVKEYKDTILMKQLMVTDCDMDVYNENLNYINSLCDIVGVTIGIRRHVAVSRMLNKLGFNSQTISDIREGLGKLHHWCIENDDPQLKSNDQHEPIIQMSNLYMYANEPNSKKIECLVSTLMSDDIENDFMGHEIELNFIATHKQFMDINSGLDASMACYDDFVNFIKSKPYLTVMRWIGVNSAKLMSWLKEAAKYTSNKIGKLLVWLIENTRSWVNNMQSAIQLVYKFLKADDSEMDQFELQDMFPPSAGMSQARPYYEDELFTGDSSDNESDTTVDENSSSGAKINTNSGTVVYKQIKEFLLTIATVVLRGCKAAIRTLTNYIKSGFMCLRDTVMDYARNAMNQVKHDGSNWLCRVTGNADSLAGCRCIIESPKGTYLSNTIEKCPHFIRINWDGDLDVGLMCNKVHASAHYFKELIKNVNTHETTGNLIMNDNPINQKRLNEFEKLYSENKIILVGGYYMHDSVTPDGANIDKGLLKMCDELKSGYIFGSNGLVPTDETAQTMTRLWKLSINDSIFKANAAEREGKAKRVCGLDGNHYEPNTLPKFKISGQLTAMDLAAVNQCDKIDEVINIGKQTENIITLPSKKKPNRHDMFKEYRNHSTRTMDDIVLRRNIKVINNQPILNNIAKSTRRKSRSIIDNATSYDELLSTAFILSNTSSLKLGSEKVHAVSHLHDVFRVAESNGYDLSKFGVDAFNSLDKAKQIMNDTTIYKYISNRLAHRQRKSRRVGFNDVVRVRIIGDIEDDLNKESDGDENTPSSVVVPAGQQTIETAKETANNNNTPENGTTQAQDEVYTSDQMVKDNDHGHSSVEANSGPTIQEEQERRGIKEEENRNKTQTPDVPSLKLYKEHNVPKEYWGATNPAPLWTKRGATMALFKGHAGLRSDKLAKHAIAQNDGSYLYTYDMFGFKGRVKMHFEKVDGVIQKHGWIAINAVDEDFIVVIMPGEGNRKVYCSKPAGPVVNSNLENKLYKALSMGGSIMGMLQNLIKTIYISLANMVKKVKCQMQSKLAFRQFGKTVVQRPSRYHSVKQEFKNNKWLNEMYQTSNNKWHDDYDIYFVIGKGMGKDRWVHVALGNDVITVEVSVNAMWMALTPKDSLVVRMIKMYRRMGEQEREYVQIDRETLRELSMDDDTIEIESGGSVLDVYYKKMKQLFGNTTNSDALETMKLIRANPLYNMLKSDGLISHNKRHVKLNANSEYEQYFETKFERLAGVNVIAICIPSGAGKSTLCAKYPDLFIDIDTLMRMEDFAAVETVKFNDGWDMVNKRYRERLWSYLVAKPNNTKVLLCHGPEQVIGISNEIYIMIPKWVGTKPFSESNTQSLERAWKHRSQYKALNVTLDKMAVRRPIDHNEMEDMCLNVQRMNGTTSKFSSDVLGHLETKLVNNNSNSGYHATYDATNVNKYVLPVEGHLTTRTNYHSRPVLQQMTLIDREPETNRLVANKQSNQLFNAITSRLYGINQLRKVNVDTDGYMDMLKRVCHDNFDDMCKEFMENTISPDENDINAWLEVKGHKFNYLKTCYEYAMSKPHMFSSKLAKAHLKTENLMKEDVEHIVDQLARVIVWHEQQVSMVLCPVINRAKERFKLLLNDNKMKYADGMSPLQINMALRKVKKTSSIVELDLSKQDRQTDKQLLEFEGELLLKLGVNNKCVEYLAEANEGYMIKTREKITAYRPGMRWTGGEMTSLGNEIRNCVLLGQIDMAMPFEFALTLGDDSIIFTDSEMDEKMVRKMGRDYHNVEVTYSIKSDSGIFLQHIIAWVGDKYCFCCNPLRLLERYSISEDGINENLLNKASSYLNMLGHSTKTAMVAEKIGCDEPSSNGISQADALQAQSMYLNITLNQVHDIIDQLLHSMIKPKFRTMGIMVWSQRQYYSKFDMNNVAHNDTNRGWTYSNEYEKLMEVKRNAHTEWPLLGHFAL

SEQ ID NO: 1315 - protein, 3787 aa, Botrytis cinerea betaendornavirus 1
MSYQTAATNSNNNKRSLGLLPKYMPRKNMSRSDDFINMDSDIYTMTNSMTSRYNQPKISKLSTSLRIMREDVYGPLGAISTRRNHVYKDLICHKCLDKHNKTCSDEDGLTYSNYVKYKNDIKSRKTIGGFIYKSYFHLKLDCEIIGNYKPVFPYLHELIETSVSFVALINLIEPEEIAEPVTDPVVGGDGYCWKKIFPFSNYGKFMTYAHFKQQLEFKYNGVFKMYVLLIMTEDGNLHLEDVQSFGFGKDEYLGPDLARGAETAIGKAAPPSAWVHVCKLPESHTDLPCWNDSLHNVKIETRETEPNGLINTKFVKVDHSDMTLPHELWNPNKTLVRCSIDNLIETLVTKIEENKSQNKHSTMRYGLCYYSGVLVMYRWRFVDALSNFTRHYSIDEFTVYLRTLNMQINRFKEIRGLSWLKEGIVSTDSDVTDVRLSIDRLIDSTNIYMNGWTNTTRCALVGYTPITMLEKIANDIGLDSSMVNTNQLNNAISDMVNKRVTRAVTKHTDNAIILPSSCPDDIVNDLNNEFGNGTFMRGNTAHHSHVYHHGSRVAVTNMLYNWHPREGLVYDIGGNPNVHLNAGHFNVHSVYSTNKAADNARHIKWVKNATSWAKRNCDVAKQPSVIPGMAKSVLSDQNGVWCDKGLKNCVHSNKAGSFAMSIDTIFHISLEELFDFYVRNMVIHSVHALTIPSDYSYKSSGTLKYNEGHWYKNNDNWTIEFNGESLPYTQSIDKTNVLLNTPLFTLGELVIYCKIGGHRGAHLIIEHFTLLRSELDSLYAQHVMWFNTNMDELFVMIPRIDMDKSKTLMGREPFHLEQVVINIRFYERLLNRLMQSYTWESLLSYAAGLIGRVYATSSGLHMKWDLTNAQVRDHCLVAYWSMNHINESAKPLIQQAERSNRDPDFLTSLWHSLKNWVKDFGSQFDPTGSNAIQDFIAYNKGDTLKLIQMFNNASKSVESLSVATQMVHSRSIIDWVSTDLGMIYEGVNISIDTWRLSTQMLDKLPTVYDLLTYQSSEKMYKRSLCAPQPGCTHNHDTLHSHVTSSHGKSAKCVCCGIFSNVSTNGGCNLCSGNPPCSNKNLKCQHEHTTVNDECCSKKQCTCKKTFVCLCCGLGSMSTYCNVCELTPKNNAEAYPTNSKPKQPHYQHSASMPDTMNDTSARQPEATVPSEDSREFGFKPNSSSSNNPDSDTKFEKNSGNNADMESNVSIPASKPENDKPNVATDNSRENGASPVNDNDDAFKFTKPKLAPLDELYADSSLISYPSPIINITTEERDYKHTNINLLPETYSGAIGVKVINYVNVPGDGHCGAHALARALHVNVESVKKWFSIALGHDDWNSSDELVAYAQSVNTNIITIEKDAAILTRSNEDDIAIAILHGSLIGLGMHWVPCECVIVSYASMFNVRINHTFQDMLAALPVSEVTNDEITAFTYSHSRENLSKILTIGQSLVVDYDYISVNTPGHTTNPLVSDHNTNGVKFITGPTGSGKTTLAHTLIKGKILLVTPLRSAVTTTYNYMATKYKVCCRSNSEWAPNEANNNTCHGYDIVIMTVETLYAGLFSLERGNETYTQLIKNRSIICDEIHDLTPHYARVLTQLPAHKTYLCSATIPGISTNYINTFDTTTSFMANGTFDKWFNNDIERNDINDNTCYIVSTKNETNLIRNKSVSVLNSDTLNKIDINNARKIIATKIAATSVTLPLIKTIIDSGVRIYAEMIFEPIINNKTIRFFNYTKYNYSWLEMIQSRGRVGRVQAGHFFGNCPSDSTPLAADSMLLYSMYTNTVCPSSLQSTWASITQSNYNSIKSKITSLYPTDGTTPEWDSEFITWKSVYNELLVGKKSGLRPRFSDLECSLENIMLNLSNIVGVSNVSKKIGNSVIETSIMWNEIGFDSKLLNNKKIDFNKLVVNVNESQSLINIKKDNNQQLSEKLLLMTVSTIFETITGLIASGSAIVNKNTTANQIGQFIVYPNIMAAEKSLGTKLRDNEIIGIINNSTKNITVNIVKNIPSNDTMIVVSNYRTTHYRAEIAAIEAIVESKNNIMQTLSNSTIYFGAPGTGKTTAIMKHKEGHYITTTNTQMLIKNRSWVPPNAVPYDQDLILVDEVGLMSVTTVLTLAAKCEKLICTADLQQMVNTHSDTHTMYSGYESGLQLLKSFSRNEELTLTYRFGPKTCAMVNRLGFNLKSAVDRDETITSSIGNVRNKKTISNLLFESNPDLIVCSSNALARHIRQITSINTCNFAKCQGLEVDNVLVLIDNLHNNRKDANINEFASLYVALTRHTKRVHIHVSTDDASLLKTLNVTPMLTDISVNNNIGGNWTFNFNIYGKMLDAIVDDLCKSNSFNNGISILREWGSGKISSNTALLRMDNFNINFDPSTLIFNSLHTDITTGLEVCSVSLFGHNVYLFKLFLDDNKTIIELLTSGLPSGTVVRKFMTLTGKKFIKKTGRVTAKLISAIASIMNVPREMYEFVMSFDLEEKHNIGGGINIGHLLGMALLGIKKAVILLIRITKSIKDKVMSSIDGKITAQFLKDYFYAYFNTTHSSDIGGGVWPANVVGLYQACNKAISNTAVHIYDWICDIIKKIVSFMSKNDNCTGTGEQPQTNADPEHTQGDDHDMNDKSILVNKEVITTTNKTSRKLSVTFNDKAINYYNDGNTEFTNLDGESKKLSRAQRATLQLNKHLDINSEKPEVPILTDCDTDEWTDDYELLFDYDEVVKDLETENKQKLDNTSEHVDSDYDHINDGPLLNNEDGNGIASKVKPDEPTDNNDTITSTQASELHNISQQSAKQDTSHITQLADYTYISDVKTKLNFDTFKPNFVGRMVMTVKDDTIVANISLPGAGKFGITVTKLVNKGEHKIIVKDNVSTTDLIMIKNDDGYRVYSHRENNAFSMEAFGTAIKHISKLGGGQNSSAINLISDILKTVYQFGKKLVKLSSYKMLFIAGKVSQRCLMSDNDCLTTYRKLCKRIPTSYKFSKEYEYSTSGGTTLSTIEIMSVNKSPTKLFIAIFEIFGKTRVILYSNNVGLTNILERLLLTTNAQSYNDEVGGSDGAISALLKLGINVKDILYHNNDMGVDEIKKWLYSNPLNSMFSTSNEPTHTSYKSLLYQEMHMHSEIRDKLEKNETSGKKIAFCIASGHGKTTTVNRIRRQNLEFSILDADEVQEQASILMMPFVDKMLNYKAKLEKYTAEHPTLDAMFIHSPICAPHGYKLVTIINDAAVFPVDRVWSQDNVDHLSKCGSVTHVNGYDDLYKLCVSYLNKISTGDITLENGATIVDNIDSILGYDFMHNQPGYDDLFRLPVGTQDRLEFSNGNLGLGQQRVYVTGAHVDVMRPTISKLPSALPNAITSRLMGRQKLRSMHMTIDDYELLMSKMLVNDYKTMLEIFSHDTISINYKDILDWLVNKGNKLQLLETMLKKVVNDEHATDPASISVHYKVENLMKEQVNDVLDQVGRVIVWNNQNINMYACPLINEAKARFKMMLKPDVVYADGMTIADLNESISKYRSKWLLEMDLSKQDRQTDMPILKYEWDLMRRLGVPEDFIEFMTSFMPTFKITGSNNEKAKLPAIHFSGGAMTSIGNEIRNLLLIADCVGNNYSAIYTLGDDSLVLMDTKPDLEYYDRICRSRHNVINTALCDKQCALFLQMIVNRDADGTFYLSHNFQRLKEKIAYSSYPNSSSDWKMKYAAYLMMIGYTKQTYNAMIEMGFATFPHLGTSMSQRVSANAIYNKMPEVAVFNLINDIIQTKNVISEEIIIDTTMIMTRSNLLNGYKRVGPYVDNHTTMLSTLQEYFNDHN

SEQ ID NO: 1316 - protein, 3429 aa, Gremmeniella abietina betaendornavirus 1
MHTNTYNTTNPINSPNAAMNNINKRKAGLYKSTANKNHSRNNECTEPKGIRPSFKDWGSIKKVSRTKIVKGTSDSKVEIKNKVMATNSCWNSIFGYDLGVDAMIDIDMIKMSLIGQEEDAEHIRLHVTMRKGILHFENPIGLPTGDPSPELFAKQREFVKTYKGETVGLLDILNKHDGNTLVGLSEEPLLDRIAKDAGISIPQITTSQFKTEMDKLVNTRLQHAATNHATKVILLPTSTPVDIVEDLNNLHGSGSFVRGNMAAHSHIYHHANRLMLTEMLASRHPRNALLYDIGGNINRHLDHGRLNVHCVYTTSTPADLSRHTLWVKKATQWAHANLKNKSVHGATYSSIAASMIKEDNSMWCTNGIANCSHAPISVGFAMSIDTLVHLDPSDLIKFYIDNNVAHASHAMTIPDNYAYATKGVLRHNEGHWYRTNNGTWVIEFVGESLSYEQKVSYTDAYLQTLIFTAGEMAVYNKVVGRKGPHMLFEHFLITRAKLESECIKHVTWFNMNMDEIFVMIPEIDFDSAVTLMKREPFTMKTVSINLRFYERLLNRLLQEYSWEATMAYASSMIGKVYATSSGLHLKWNMTNAEVRDHCLVAYWSTNRVNESMRPLIQQAERNNRDPDFLTGLWTAVKNWGRDFGSHFDPSGSELIQTFIKNNKGNVLHITRLFGATSKSIDSLNVAAQMVKSRNVLEWIGSSTGVVATTRNDLIDDWRLATPSKNEIPTVYDLAYERSAPKSKRQVCNASEICPHDHSTYHQHLIPGTTDIEGNCSCCNVYSNLAPNGACRVCSPRPLVRGKQLRCTHKHIYVNDSCCGQAICKCKHSHTCSCCGLPSNAQLCKVCNFTPIQDIIGDKYGHLSKNDASLNDVVHTSDKLTKILKLRDNNQNPDVDNENDSDLGSFDTPIKAPKLAKEFEVKSRPLSVESANFADVIAELKTHKGLKPVKETDKKVIENLIVTAKQSDNEVLDWADIVNEEANKEAEETTQVEPVVLNLISEEQAKPNSNTEFWAERPNILNKKPVTSVNLVKIDGIPFVPISIVGCNVHGFIDVPGDGRCGSHALKHWLKCDIAEIDRWAETAFGRNDWLEGEEIAAIGNAYGRNVLIVTESISTLYQVDSERLAIAIVHGNCIGKSMHWVVGDVSVSTVSSTLNNRLYENYLHLIKSAANTMKDRHDTAYGYTHAELDIEFICSLGGTVTLTPSSVNVNFTGMNSEPIIQTLNNGMRLLSGPTGSGKTTRAFEILQEKLLIITPSRSTVIGSSKLTKTKNCGRASSRWWPKEHMTVNEINACDVVYVTVDAMHAALSNNEHSMYHDLIKSRLVICDEIHEITPNYMEVVTHLNISRTILATATMPGVATRHNLKYNNTVEFVSNGLIEAIVDEKTSNGLSDGQTVIVATKKNTYVNQDITAINSDTLNTIDLSKCTKAFATNCVTTGVTMPLLTELIDSGKRCTVNINYSPTFDGKLDLFRSHIRQTSIVEFNQSKGRVSRTHPGRYVTPIPTQKTEMSIDDLLASSALTGCPCPDKFAQYWSNLNQSILSKAQDKLGKIPVKTGSLKDHEDRVNLSTWISRYGRLLELKNRKLKPTFVSSNIYREDLVNFIPSCIGTKNNMKTKHVGYFKARINIDKQAIIPKAIFGNTKGLDYDTLTVAVESGGDFIDIENDDMENIIPKVKLILVAQITKAIKTINNSMLAILNSRSLNAAPSDCPGYRGHKSMLKATGRVPKLNDMVGVVDINTGIGAIQLYKDAPKQDENATWVLPTYRTAQLQDDMRLLNSANSNIKIVDYLHNCTLYAGPPGSGKTHSMLNTYGNIPIVTTSETQLKLHNDWTTPSGVVNYVPIIGVDEAGLITLSTLLTLIAKADKLIFTCDVGQIINKQEQNIQELTGIDSVAHLLMKFCNVITFNESYRLGKNICQVVSKLGTKLSSKREQDDEIVGISCVIGNNPEFSNAIINSNPDLIICATNNLARQLRSFIDINITTITRCQGADVKRVLLVISGIDYRNIGNETLYVALTRHSQHITIVVDRPNINLLGSLEIATNDFVNYSRAVGGSSNITSRMYDSIVKKSSSLPMPDAQLEDILKQALYISNNFAHNPVVPSCIISKVGKNGLLQGNLSVMGLDGAVHNKFITLTVFGLKYSRPVVLFYGMKIEELRYKLLSDMPVRRFMCLLVRQVTSRFYAYGRDFVVLLKSWLTLALEKTSEWAATSHVMPSINEVVSSSGNMLMKILTIFMTPVTSLISILPTLKQTLKKLFNTSGDSLGSDAARLLHDWMFNPSSSKTKSGGKVDILSSLYDIIIMSTKTAISGVKEFIVWVIESMKLGFTYVKNKLQPNTLDDSDVLFDYDVDQNKDLYTDEEKQLFEHGNAVNVNNTNNEPPVVPSINVEEYDIIDDTDSKPSIPQEKVVEPLPDYSGESWGNSSIDPVNLLKPTDIPLPTCHAKTLIKVDKIKTKLDIETFKPNFMGRFLIKRDDIGLSGNIPLPGMKVKFSIHKTCEHYYTVNIIRDTEIIEVYLKKRSTGYELFANQDTAADIDPQHIRTALVALNKLGGGESAFITLLKSIMQATSDFVEKLTHIIKWNTRRLLGQCQHKSFQTDLNVIDTYRAFSTALNRSFYGRTHKGKFLSGTIITTCYVKPEVEDKMQESFILINGIGFDTRVTIYSFEQIDESLLQIMANSLGARAADHIGGKSKSFDSLLRLGVDLKALNTAITPQDVKYIKRHIEKNPLVATFDYGPEQTHMDMKALGKLMSELSVNAHVDLKNKVMQKTAFIIPSGHGKSTTVRRLRQQKPHLRVLDADEVQEQATILLLPLADKFKSYKYKIQEHVNSTPTDAVFVHAIDCVPSGYKPIFIMNTKAEVPLDRVWSRENVEYNERTLANLTLIKADGYDELYKVISRILDGGVRDFMTFTDYGMLIDNIDDIDGYNFFANEPYTDDVIRLPAGKHDKLTYSEVRHGPGQQRLFVSGTHVGLARPTIQSVASSLPNAISTRLMGRESLRTEATTIGQYHTLMQRLWHPKAEELFKIFGADQISLSTNMLIEWLVNKGNKMQLFDDMLRDVQAREYATDPKDVTVHYKVENLLKEQVNDVLDQVGRVIVWNNQNINMFACPIINEAKARLKLLLKPNVVYTDGMSTPALNAKLGEYKAKYILEMDLSKQDRQTDRPILEYEWWLVKNLGVSEKVIDFLSSPIPTFNIHGSNGETARLPAIHFSGGAMTSLGNEIRNLVLVSDCVQKYVAIFTLGDDSLVLMNQPPQLDLYNRICRSRHNVTNTADWSTSHGTFLQLIVTRDDDGFFYASHNFSRLREKLAYSAYPNDSLEWKMKFASYLMMIGYCPATRNAMQYSGFVVFPDLGTTLSQRLEANAIANKCTVEAVLAVIQDMMHIRLEKSTPLIVNTTTILKPNKLKSGYKRIGDYQEDITFNKQLAALLSSL

SEQ ID NO: 1317 - protein, 3148 aa, Rosellinia necatrix betaendornavirus 1
MTDNKQNNGQAHANELVQMDIKQEKLAKYHNLATNNPELFKFATDRVNVKSGITMGGDGSCWVRMCRYTINPSQPRPKFGAFARGKPYDWTKFIQFDFPDDEDEEPTVRPIDLETMRTIAGCLDPNVIVELTWNGDNLHLIESHLMRCHHLKLFSNGKHCDDPQEDKIGLTFQPLMGTKDGKQVHCHDNGVPVYRFGRDILLDFIDLVEFTNKGAMLGLTIKQIQEVLENDTILQGKITTXXEFKNAIVDLDRRLVNSVTKINLNNSLTVPMSVPKNVLDELNVAYPDFLYVMNPKAHHKHPFMAISRQTLNKRIVNNTPINVPIFDIGGNPSFHLAHRHTNVHSCFARVDNTTEARAIDHELNTFNEVNMHAIRNTKNESQRPNVLVEQMFESIKDGSDLHYCYERAQDCKVSPKHAAVGMMIDSIYNITPDELISIMCAKRIVKLTNAFTLPADYFIAEGGQLAFNEGHWIKTKRDFKMVTNDDSLVYTGPRENIEFWFRSPIVHCNNFGVYSRFKGRSGPHVIFEHYLLTNTDMTEKTMEFAHWVTGDSEVELFNIPDVNYKQPISLTFVKPVTYSQRRINLRFLRRLRQKLLSNEPSIQMLNEYGQQLVSQVYFNSKNEFKAYDIQADDINYHSIVALMMHQRMVESTQDMVETYTERRGFDNWWTSVLGSLKNFAQGLGYQFDPSTNAMLSEFVENWAQKPNTEIFKITSAWSDLIKSVTKSMDVSTNCVILTSKLIVKPFTIINPPELEDLAVKNSSQSLSDMVNHDGPQYTRDECKQHSDCIHDHNSPHNHLVLGVEGTPCKCCQILSQTVNGFCSLCLNDQFCNSYHSECPHEHKLLSEHCCGRAWCNCKRTFVCQCCGIASSTKNCPVCFDDKHLNVEPTVKVGAEATEAKHGRGHSKSESKNNETPSGGSDGSETKKPMNEQPPKAPQSQTKTKASVNTDEPKPSTTNLPTPSVKVNQGEFKKKLAAQRPTIVKPQTATQINFMATDDIEVPIDDRVKIPLNDLKFGESRYIKRAPTVAPKPVEVAAATPIQKDDNDEQEPLEVNDDNQKIEPVIRFSKELSDKSNFTDVIIRRTVLNEITKCYISGYTQVDAFGDCFAASYLSMMPQKRHAIVSTNMGLEYMSLEDIVTLCYRAHLNVCLITKRPIIITGDPTTISYVNILDVKLVNGKSHWNPCMITDLQYDDDKIIRPMDLSIDHITNTYAGQPEFINFLKRYAIKYESDVLTLHIPAGKEISGKYKIHNDRKPTKSLYADLNDYKYLQSTTQPRCHIGHHFINNLPNPVTIRMHISSDPISVNSLATNSTKDWSTGDIKIDINKIFEDKTNLDIQDDGLRHSYDLNVKGELIETVRYTELADFYEMINLCSWRKCDLITTTPMGEPQCSYYELYLLNPSSLHSTAYQILKNRNSKLVYLTKTRINNNSMYITDIEESLTHARWPITVSGKCDTCLNIRIPTKTQCFKCLYPKYVASVNFNQPCVLVKHSLLNNDYSNVRSCAMSYHLNILIKIFNDLHDAVAATDYGKKSFSNGCFIIKSVEQVRAIRHNLTNDICIVLNEKAEWAYGDHKFIESCVRNNSIVIRHKNATNYHFKSMSELNNMENIPAFPQVQLIDGPPGSGKTTKLTNMVDEIITKQSIMLNRDKFTTKPTKERIGLDEAGLFNVFDILQLAIKGVKEIIATYDSNQMGTPDLIGYDQGGSTQWLNKASTIETLNVSYRFGPETAKILSRFGMPMSGLNINDKGIKFIKTVGSISKALTTLEGRQVNAILTVSNKTKSYVARFTNDVQVVNIDKSQGSEWDHVVLLLLDNDALTDKALYTALSRHRISCTVLANNNDLKLPNGLSMTGINEIGINISSFVVSGCRLMLEEILIPTVELVKCVGRYLPQLAKYVVDYLRFQAVRMNVLSFSDTATILWQMEHDSNPSRFVTNIKKYEGSTNYEKLFNFMLDSNILIYGFDDMSNYKMKRLVDEFLTSLRGYNNSRKFNMVKAISVKNLLRANGKITMEEISEILNQDLRQDYATVDKILDDMNITKVAAENGREDYEIRSSALLHLWMMDEAKWTNIRYKLGRNAATGCLDLDAMERRHKXLLSRMNYKTMRNLTEAMIVNGDYKEVYDVLARNGISINLLYDNKVISSTLDIMKTMTDFSKYLYTLSIKWFKKLYNRFIGANHAEDDIEGGVKLPISPDNLFDATNDKKEDMKEPDYEGKGYGDYVEEYNVSHDINEEYIECSHASKRMVSNLPSTANKDIRTKVNQDEMLLTKPFRVLGKNLNCGCIELKVSNFTLYVTIGNTVHSDGSGFIFNNMMKVARKMLDTWMNNGNVMMEKLTLYIKDIMIGLLKCYYCNSGNKFLHKVVLPIFGDSASQIVQSHPQLRRLARMHKRIVGMRNYYINVPWFQDRSHVFITVNKNSTTIMITSSGINVNHLGLRDILKEHDTPALTGLQQLVFETMGVKLAEGDAKYHKHLFEIHPLLNYEGPGRSSFDTVDMMLEDATRQIMTSNLLNYDKKFKSQVRAICIPSGSGKTTFIKRNKELNITDVDDLIPVDSFLKIKDLNLKKGWRLVEDVYVTRIRMWDEQRSSPMILCHHPDQVKHITSDISIIIPEYTIYKPWHENDMAELIEASRYYPTVRVKNHIELHDQIISMFNYNLAPKLRDDDVLDIDYTDSIEFYQNNHIDDHIKYVLPNKGIISSREQLHGKKVLTNYTNRYLPPVTRPSTGKIYNDLFNAITTRLYGVEPLQELVPDYDETLSNLSKFFVPNYKELMAKYKNAPITVDHTHMMRWVEKKGNQYNNILVLKRHLEQLQQGFNMQQARVHYKVELLLKEKIKSYNQQIGRVIVWHEQHISMYLCPIIDEVKARMKSLLREGILYTDGKDLFNLNKSATIVPYDVNYKVLELDLSKQDRQTSKEILSKHFTFMQALGLTDGHNALYQELLLTWSFNSRTKIRGNLPPMHMSGGTFTGLGNELRNLYILSDINAMYPIDYSWSLGDDSISLTKSEMDEEVLRDMAAKRHNVRLTISLGKTGKFCQLIFGKIPGVGWRFSPSIIRLFDKLCTGVGDYMANLRERAYSYLQLIGHHRYVISTIKHLNYDYLPIQGTTIEERIYLNCNYYKLGDNTIEAYIKTICLMCYDPQLEEHKFYVNY

SEQ ID NO: 1318 - protein, 4020 aa, Sclerotinia minor betaendornavirus 1
MGFPKQYTTEPWYVKMLSTFRSSDTNADHYKSLHGVSPATQTVMPWKKTDVPKPIEDVLDNSKTPDTPTLGTARKSCLWSAMNTLNPRGMEQIPINISNLKYLDYQKYKVWRAGVTKGWLAIEIRRDHSKNHLHCLSGNHKEQLLSGDGKLTGVIHWTKMFTEINNESQLSWGQLNWSNPDAGRINFYGAKATVLEKLAHDLNVPLSMLDSGAVRAQLASTIASMSDIAVKPRDTRVEQLPNDTSDLVIDQLSRDYGNFKFIRGSSGSHPHPYHNAARHVITRYIVSLFPKSDLLYDIGGNMLYHVQNGDWHVHSVFKAESYEDKSRYLTYTTAVVKHISVRKSQTNITGATNSITQSMLSKVLTADNKLWCNSSWGDCQHGTKNHATFAMSVDTLFNIEPSELLKGYIAHKVIMAKHALTVPKAWHMADSGTLMFDEGYWSKSDGNLNVVFPGESMTYQNSISLIDTYIKRPLIMGDSHAIYCRVNGYKGPHLMIDHFVLPRSLVIEQFMKHTIWSNPDTNTIVVVVPVIDIHAPVTLLKQQPFTMEAMVLNIPFYEKLMNRLLQPHTWEGLTQYAAGLVGRTYGSASGFTRQFDITNRDVKNHCLVAYWSNNRSLESIRPLVRRAEIDVHQPSFLQQLWSSLKTFLTELGRQFDPTESDFIKKLVSDNSEDSMHLGLLLDSAFKAIDSVNASTRLDVSHYITNGMMYETGVTATTKCVDIDTWRQNHVEVSHSTVYTLITGKDDITHVTIELCKAAVECQHNHKVAHEHVVGNSIDQRVGICNCCKILSTLTDQNLCALCGSTRLCHGKSHLCKHEHTVVNDECCGKPACTCKKNYKCSCCQMPSPLPVCEMCRNAPPPKTAVWDAGTIRQPSSQADTGRPEPTSTTGDNRTGDANDNNDKPSGDDANDDGPFGMLSDASRRASIVGAEDTNFTQHMSFGDHPSTIPINTNIVDRAQALQGTDSPIDYEDFVAEGSDHSVVSFQIPDDTSTINDRVSAERQLDELRKLVPINNEPVNEYGFAGLEALSTVYNAIRFTENAATKSVTKLTLPPNLVARQTTVSAVVIAYGEARGDGLCGAHALSQLCDSDIDTVTTILKRVTGNHDWWSDVELAKAAAVLRINILLATPAGSILYINDSSQRHYVSICTLVGLTGQRHWVPCSSMVDQLYTSDLRNQYYNYIFLATYASMSQDTSKSIEDVRSAVDRFEPINVDSASIISYHVDYEWSNIIANYPNGVFTTLGYEHTSKSFYGQPISNYVAEGENGLLMVSAPTGFGKTTRIAEFNDQKKNHVVISPSRATVISATTYCNDVLNITSQGRADSTWHPKGKSDSTLSTAKVVYLTVDSAYMALCNGKPNATWLKMLSGRCIWLDEVHDLTPKYVSLAKVLGSLVTGVLSATLPNLPPVTDTLHPIRTIFAAPDQLDSDFNDFIERGPEKGSFWVVPSSTQTANMPAERVTQATNNGVKFASITSKTLASLDLTNVNSAICTNCITTGSTLPGLENMHDLGYRITPELIYPPYKAEVKGVNKMRFFNYKRHQYDMTQLTQSRGRAGRTSTGYAAMSLPAAANAPAVHVELLYSLMVGIPANTRCKDLYDNLKTNKVNFDAIKRERDIATQRGYDFQNEQWDVLDAWIETVSELYLHLKNKIASTDAVLDNNTISAAFMSALNTDSKLHIDKSIKRRIQTNMHNKSIHYPKLHKCDCGLLTILGKHGCGNQLVLPKPEAEWFNMTIEQSYSDGSFSHPKSILAIDTSSSARGINLSTKLSQQFVSIYFKMLNTILHAAKHATTSNIPTSITHGVLFESVNSNKHVNVSELKHPHKLNSGSVLGVFDSNMRVLRLECVVGATIDCSVTSPQAIVILPVHTANYALGMGLASLARNITLNDAIAVATRSTIIVGPPGSGKTRELHRLFDNDQQTKRIVSKQTDQISEFKNITVPPTAAIFSDNVETIYVDEFGLMTASDILLLSTKCNKMVMSGDVNQKIADDTDLDTSTTLDLSWFRDNVGSSTVFNESWRFGTKTASVLSYFGTLGPCHNANDKGIGMVQFNWLTKKNLNTILIDHDIQLIITHSNALAMQIKLILGTNSNISCTTTGRAQGSQEKRVLYVAYGNTSETYTAAADLPALSRHSEHCVIAADYTFEATAKTYGFNKHMQNVDSMRYGATTMPKVSDMSVDYVMEAWSNIRLNYHKFAEPRYNKAFDNYLKYHKALSHCIDYLTNDVSGTNGLDISISACVIYNKLYRGVDDAEFTRPLTPQHLEVYNSMTNILNTFGPGVTVSVERTAEVMSEYLRPIVSVRQYFILPFSTNVKLIGNANKFTSYALCNVLSGKIIMTQTNNLTFQRPTVNSLRAFIESMKDNVDWDKDMCARMSISKLLFERLKKSVTISYQEMLNTSESIYNYTINKVPTLYSLSHNKAPNLPKSQTLFERIIDSLLIDTPSPNQTITKVYLDAVNQLVEGDTPKGSSLGYATLSEELMYDALVSTLRGFYEHNNVDLFISQVCDITSTCFDAKETAGDTHLLTLPIKRLHQTVEHIHKHIHNVVIVDVKRRKIIATVDIRPSTEHYWHISDLYKRTHALLLLGLVDDQINTYNNYALCNIISNVKETATKAITAQEQFFSKLLKYIQNIISSLRIKVLEGKEILKLCGIEQMYATRMKQSNGTAQNTAETQNDVHSLSTSTLKHKAVKGLQLMVLGHIANHYDIDINKQLQRTVASAVRMAHDDRAGDDLSTSPLLRLYYSLKLYAQGYETGAANIMGYDVFNICNVKVTINESLPVTLLRRLNDSARDSLMSETSRKHVVSPKHTRVSSSNKWDGQSVGLSIKRIFATSESNPADDTPFDDLLYELKSTLSDDISVTTSENANRHGMMKLNSLKMVLAMYPNITTTMLVITKAYYELYNHVFSPVLGALQNTICKSVIKVKNSIVRFLEYDANLADAKLEIQDLRDSLDSARESPALTPLDPXPIKDDSSGAESSMYEDAAEGICNKMEPASTDKIHENSVLAEYVKQQLMSGNGSISESLFTTCGSDVKTKMVYSQREKFKSSMFVKWDHKASYSTVHARPLPKITMGTIDSVIYMVVDKVALKLVPTYEGYKIWWNDANALRNENKLCIGLNLLTRIAGDKASDMILALITKMFTDVINWCKLTKDELVWKTKYLANGVCRSKYNYSFSTMSLYHILQDSKPFRRLMCHDTRSRFTMVGDTIHITRRTEALVLDCHTYAVARNTATGCCLTIYSALQSRIDIMVRAIEANMVAGLCDYTDRAGKSGLDGLRKLGINIDSSTLSDIDFVKWKSILRDALENNPLSAIFDMSLDDTFTSFKQLMESEKAMLDIENRIDNTISLLKSRVAICMPSGHGKTTLKGTLLRKYPSIDVYDADDYITDIDALGWSNFDRMMAQYXLRLTEAVECSSNNKPKLILCHHPDAVPDGFSIVLFMNSETPYTPERLWKQTNEARLLAMQDKYPLYTVTFSDMEHQTILFMLRSGATPSIKLHAKSELVDPMPYSEAEQFFQSPGPDNLWHMPIQGRLGVNDHRLGTAQQVIYKQGPHVGLCRPTVQMLCSSTFNAVSSRLRGIEHLRKVNFSREEYMTKMSYWFKPNWRDILHDYQNEVVMPSVSASLEWAINKGHKVELIRDMAEAVLNYERATEYTNIQAHFKVENLMKENVDELEHQLGRIIVWNNQNVNMILCPIVNECKARFKNLFNDNLLTYTDGMDMVSLNKHLSKNSRSKYMIELDLSKQDRQTDKQIIDFEQWLLTELGLDGRVVHYMNGILNGFSLKTPDNVTGFMPTMHLSGGAMTSLGNEMRNLLLLSDICKGKAVNHVYTLGDDSLILTDDDFDGKYVAIVAANNHNVKCTFTTSEHSGVFLQLIVMWVNGRYIAVHNFVRLRDKLAYSPYNADSDEFKSKTASYLLMIGNHYLTSKRLLELGFNGTIPLGTTMEDRLEANALHNNCDVADVLNIVHDIVVISYGKHESKLTITGVGVLSYRHLKGGIHMTKGRQSDTSLLASFQSAVQKELDNN

SEQ ID NO: 1319 - protein, 3459 aa, Sclerotinia sclerotiorum betaendornavirus 1
MSQTITNTTITTTTITDAQINTHKRAFGSLSKDYPNKNHQRGLTWFDVVDPPKQQKHWPKLTPNPRWKKLSTSKNAVGKAELGGETQVMASYNCWQCIFGYDLGIDTAISLEMIKMTIMCQPEDAAHIQIQASYANGMLHIANPPGLPTGEMTPELFNAQRKFVEHPIDGCIKLIDLVDLYDEGTMVGFTPRTITEKLANDIGVDVNSVDTQQLKKAISDSVNSRGTKAVTKFTDQAIILPTSCPEEIVNDLNNEFGNATFIRGNKEHHPHIYHNASRKAVTNLLCGWHGRDALIYDIGGNPASHLNAGRFTVHSVYSKNQAADNARHIKWSKQCVAWARRNMNNENNHSVVNGVANSILKPNSALWCSDGINKCVHSSKHGSFGISIDTLFHLPVNDLFDFYIRNKVFHSVHAITLPTNYSYARNGALKYNEGHWYKKNDDWTIEFNGESLAYSQSVALTDTYLTVPLHNIGEMVVYCKVSGYKGAHLIIEHYLIDRAQLDQLYLKHVMWFNTNMDELFVMVPRINMDQSTTVMGRIPYTMEQVVINVRFYERLLNRLMQSYTWDSVLSYAAGLIGRVYATSSGLHMKWNLTNSQVRDHCLIAYWTTNRINESIKPLLAQAEHASRDPDFLTSLWNSLKNWLKDFGSQFDPTGNNTVQKFIADNKGDTLRLIQMFNSTVRSVESLNVATQMVHSRSVVDWVASSTGVSYRRLDVDIDTWRLNQDMSGNKMTVYDHIEFKDAKPAGVNIGCSITKTCTHDHKPFHLHLSDLSRRMGNCACCGVVSNLNITKLCTICSDILPCHGKNLRCTHIHEQLNDECCLLTKCTCKKDKNCSCCGLPSVGTYCKVCQFLPDKATNKQPTNSVNNNSTTVAPIIMKPTTERKDAPVRFTFEKPQVSNTQNEFKKNESATHPLATNNDSLFVTLKEQLVDDVVTFDDKTTIKSDDAEIRSVATESIVSVEASVDAIQLNDNNIEPLLPEEEVAGTEQISTLMRAVVSVDDVNPGHADTVLTRLPPRYQGGVAVRVVGYTDVPGDGTCGAHALSVALGLNVDEVKHWLTVATGHDDWHNSEELAACALAYGRNLICVDIGDTTIYRGGDQDYAGSIIHGTVVGCGAHWLAGNCNILSYSSLFTNKLISDYTNLLRAAHLTLNGSDQTALAYSHSDLDVDSIIDMNGSIIISREGISVQHEGGNSKCQISDKSDDIKMIIGPTGSGKTTTAFQHIEGKVLLITPLRSAVNNSFDYLKNKVKVVARAQGAWIPDNINIKDITKSDLVIMTMETLYSGIFIGQDKKNIYHQLVSARAIICDEVHEISPHYARLLTVLPKNKTYICSATMPGIKLDYNCKFDVTTNFVQGDIVDYWFNEVKTSRTMPLNTCYIVGTKNECKFADMPNDIKAINSSTINEVTINEVNRCIATNIVTTSITMPQIANIIDLGVRITSDVIVKPYLTDVEKDIRFFNYSKRLYSWAEMTQARGRVGRVSDGQFYGPCPDKTTRQSNIEAMLNSCYTRAPCYSGLLHEWQMITQKNYDEAVNHFTKLGNTFDSKPKWWDEFQSWQESVAELLQCKNANLQPVFVDEYIHKEDILALIPNYIGTNPISTSMKHNKNRVGALRYSCAVDWDNVLPKHLYETTDNIDFESLVISVPDSSQFLNIETDSNEEIASKLRLLAIASILNAIKGLMARGQIYINTNKWSDQHGQYILYDSLEDAQALSGINLSEYDIIGLVDIKKSSMRITHYQQSNKWVGYVIVPTYKTHHYMGQLTDIGLIRDRQAPLVDTLRNSTLYVGPPGSGKTTMMVNENKSSYTTTISSGQLKNHGTWLPPSLIPHSQENINIDEIGLLDVSVILSLASRSNKLTGTGDISQVVHIANETNAYYTGFDSGIDLFSKYANKIYLDKTHRFGPLTCNLVAKLGFDINPTNIDKIEEIKGYVCATNDNKSYSKVLIASEPDAIICATNHLARMFRKITQIPVYNIAKCQGIDTPNTLVVLQGGQIDVLANNQLYVALTRHSQRLSIIVDPPHAALLTQLCIETENMISYADALGGSSNITQPIFNYIIESNMNRLLNDAQVMNYLTTICALQSGKISPNTMIVIMDQMNSHYNNCPFKFVRLREIKDIKQLECVVSLYGIQCIVYNISITDERELLCCLLTQVTTNKHIKEYLRSLPNRFAATGKKLCYNLYLWLSKFMKDNASVLSTYLYANDTIDIGGGVDLCHVLWLAINGVRSAFMTLIHLLDDVGNKLSKYTDGSYAAEQFKELLIDTWKKSNPLSFGDLKISSSVISLFKIFRDHFGSGIKTLWDFIQYVVKNMREWWENQFNNDKPIYYELEGTSMSLIVTDSPCIDIMRNSLDGDYSLIDGSPTISNTQYITTLDNLIDNSTIGWEKKDVPSPTCEDCPDDIQEVLDEIEVLFDYEAETNEKYDSLIDNEHHESTHECSEPEVESSPCEQKNEKENIKQNQCLCIETCNDWQLADTIVTSLDLNTYKPNLMGRMVIEKISDGIKINLKLPGVGKFNAVTKKCCGDNTHLIYVTVNGEQLTLKISKIASGYELYCMPDVVDVNFSQLEQAIKMLSKLGGGKLNNGMTLLVDSLKITRKFIKKLVRLTHYKLKYLMGTINLRHLTSNRSNLEVYRTICHRLPTSYGNSKFSTRECIGGTVLSTIELIPNNAANRSEIFIAIYNVNGDTQILIFTNDNNYSNYITRRLMTPVEHGNFAGDRSAISALLRLGIDIKSILTQDNDLTIDDIKKWLLANPLTSMFDVTDQRTYNNAKEHSIVEKHLFTDIHNILDKPLDVKYAFCIPSGHGKTTTVNRIRRSNQEFTVLDVDEVQEQATILHLGFEDKMLNYKEKLEKYIANSTKPPDAVFIHSPICAPAGYKVIIILNDGADVPLDRIWSDKNVCHLESMNNIIHTQNYDDVYNVTINYLNKKLTGDITLEDGTTIVDNIDSILGDSFMRNHPGYDDIYRLPTGKQDILNMNTGNIGLGEQRFFKTGPHPEVMRPTVNKMPSALPNAIMTRLMGRVKYRTVDLTIKDYHKLMTKFFIKGYESKLASYTDDPINLNYEDILNWLVAKGNKIQLLDNMLRSVKDDEFATDPANINVHYKVENLMKEQVNDILDQVGRVIVWNNQNINMYACPVINEAKARFKSLLKPNVIYTDGMTVADMNKSIGQYKSKWLLEMDLSKQDRQTDAQILIYEWKLMGMLGVPDVLIEFMTSFIPTFRINGTSHETAKLPAIHFSGGAMTSMGNEIRNLLLLSDCIGNNYVAIYTLGDDSLVLMNTKPDLELYKRICASRHNVENTAVASTNCALFLQMIVARNEDGTYYLSHNFARLKEKLVYSTYPNTSSDWKMKYASYLMMIGYSAQTKRAMEYSGFVSFPSLGTTMSQRVSANALYNEINDLQVFNIINDIINAKEQISEEIIIQLPVIMTGSKLKSGMSKVGKYVDNHNTMHELLIQYMEEHTET

SEQ ID NO: 1320 - protein, 3491 aa, Sclerotinia sclerotiorum betaendornavirus 1
MSQSITHTTVTTKTITDAQTNTHKRAFGSLLKDYPNKNHQRGTTWFDVVDPPQQQKYWPKLTPNPRWKKLSTSKDAVGKVELGGETQVMASYNCWQCIFGYDLGINTAISLEMIKMTIMCQPEDAAHIQIQASYANGMLHIANPPGLPTGEMTPELFAAQRKFVEHPIEGCIKLIDLVDLYDEGTMVGFTPRTITEKLANDIGVDVSSVDTQQLKKAISDSVNSRGTRAVTKFTDQAIILPTSCPEEIVNDLNNEFGNATFIRGNKEHHPHIYHNASRKAVTNLLCGWHGRDALIYDIGGNPASHLNAGRFTVHSVYSKNQAADNARHIKWSKQCVAWARRNMNNDSNHSVVNGVANSILMPNSALWCSDGINKCVHSSKHGSFGISIDTLFHLPVNDLFDFYMRNKIFHTVHAITLPNNYSYARSGALKYNEGHWYKKGDDWTIEFNGESLAYSQSIALTDTYLSVPLHNIGEMVVYCKVSGYKGAHLIIEHYLIDRAQLDQLYLKHVMWFNTNMDELFVMVPRINMDQSTTVMGRIPYTMEQVVINVRFYERLLNRLMQSYTWDSVLSYAAGLIGRVYATSSGLHMKWNLTNSQVRDHCLIAYWTTNRINESIKPLLAQAERASRDPDFLTSLWNSLKNWLKDFGSQFDPTGNTTVQKFIADNKGDTLRLIQMFNSTVRSVESLNVATQMVHSRSVVDWVASSTGVSYRRLDVDIDTWRMKQDMSGNKMTVYDHIEFKDAKPAGVNIGCLTTKTCPHDHKPFHLHLSDLNRRMGNCACCGVISNLNITKLCTICSDILPCHGKNLRCTHTHEQLNDECCSLAKCTCRKDKHCSCCGLPSVNMYCKVCQFLPDKSVKPQPTTTVDGSNITIAPVIVKPTTAKKEAPVRFTFEKPQATSANDDVKDNTTINHPLSTNNISQFDVLKQQEVDKIITYDDETTIKEDNMEIHSVDAESVGTVDTNIDADRSINNDVGPLLPEEDVAGIDQINTLMRAVVNVEDVNPGHADTVLTRLPPHYQGGLAVRVVGYTDVPGDGTCGAHALSVALGLNVDDVKHWLTIATGHDDWHNSEELAACALAYGRNIICVDIGDTTIYRGGDQDYAGSIIHGTVVGCGAHWLAGNCNILSYSSLFTNKLITDYTNLLRAAHLALNGNDQTALAYSHSDFDVDSIIDMGGNIVISHDGISIQHEGGNSRCQISDKSDSVKMIVGPTGSGKTTTAFQHIEGKVLLITPLRSAVNNSFDYLRNKVKVVARAQGAWMPDNIDMKDINKSDLVIMTMETLYSGIFIGHDKKNIYHQLVSARAIICDEVHEISPHYARLLTVLPKNKTYVCSATMPGIKLDYNCKFDVTTNFVQGDTIDYWFNEVKSNRAMPPNTCYIVGTKNECTFAEMPADIKAINSSTINNVSINEVDKCIATNIVTTSITMPQVTNIIDLGVRITSDVIIKPYLTDVGKNIRFFNYSKRLYSWAEMTQARGRVGRVSNGMFYGPCPDKTTRQSNIDALLNSCYTRVPCYSGLLHEWQMVNQKNYDEVVNYFTTLGNTFDNKPTWWEEFQSWQDSVAELLQCKNANQQPVFVDEYINKEDILALIPNYIGTNPISTSLKHAKHRVGALRYSCTIDWDNVLPKHLYEATDNIDFESLVISVPDSSQFLNIETDSNEDIASKLRLLAIASILNAIKGLMARGQIYINTNKWSDQHGQYILYBSLEDAQALSGINLSEYDIIGLVDIKKSSMRITHYQQSNKWVGHVIVPTYKTHHYMGQLTDIGLIRDRQAPLVDTLRNSTLYVGPPGSGKTTMMISENKSSYTTTISSGQLKNHGTWLPPSLIPHSQENINIDEVGLLDVSVILSLASRSNKLTGTGDISQVVHIANETNAYYTGFDSGIDLFSKYANKIYLDKTHRFGPQTCNLVAKLGFEIIPTNMDKVEEIKGYVCAINDNKSYSKVLIASEPDAIICATNHLARMFRKITQIPVYNIAKCQGIDTPNTLVVLQGGQIDMLANNQLYVALTRHSQRVSIVVDPPHAALLMQLCIKTENMISYTDALGGASNITQPILNHIIESNKNNLLKDAEVMNYLTTICALQSRKITPNTMIVIMDQMNFHYKNCPFRFVRLRKIKDIKQLECVVSIYGIQCVVYDVSLTNERELLSCLLSQVTTNKHVKEYLRNLPRKFMRTGKKIGYNLYLWLSKFMKDNITILSGYFNTSEDINIGGSTDLSHIIWLAINGVHSAFMTLVHILDDVGSKLSKYTDGSYAAEQFKELLIETWKKSNPFSFGDLKISNSLMSLYKLFRDHLSKGVNTLWDFIKYVANTLREWWHKQFNVDKPTYYELEGTSMSLIATDSPCINIMRNSSDGDHSLIDGSPTIPNTQYITQLDNLIDNSIIGWEKKATPSPTCEDCPDDVQEVLDEIEVLFDYEEETINHNPTVSTEHLEPNIDELDQMRRFSSSEPVETKDNMSSVGIEHSEPTLDKSTQIEENNPIKLDKGINESKQNQCLCMETCSDWQLADNIVTNLDLNTYKPNLMGRMVIEKIPDGIKINLKLPGVGKFNAVTKKCCGDNTHLIYVTVNGEQITLKIDKTASGYALYCMPDVVDVNFSQLEQAIKMLSKLGGGKLNNGMTLLVDSLKITRKFIKKLIRLTHYKLKYMMGRINLRHLTSNRSNLEVYRTICHRLPTSYSNSKFSTRECIGGTVLSTIELVPNNAANRSEIFIAIYNVNGDTQILIFTNDNNYSNYITRRLMTPIEHGDFAGDRSAISALLRLGIDIKSIMTQDNDLTINDIKKWLLANPLTSMFDVTDQRTYNNAKEHSIVEKHLFTDIHNILDKPLDIKYAFCIPSGHGKTTTVNRIRRSNQEFTVLDVDEVQEQATILHLGFEDKMLNYKGKLEKYITNSTKPPDAVFIHSPICAPAGYKVIIIINDGADVPLDRIWSGKNVNHLESMNNIIHTRNYDDVYNVTINYLNKKLTGDITLEDGTTIVDNIDSILGDSFMRNNPGYDDIYRLPTGKQDILNMSTGNIGLGEQRFFKTGPHPEVMRPTVNKIPSALPNAIMTRLMGRVKYRTVDLGIKDYHKLMTKFFISGYESKLASYTDDPINLNYEDILSWLVAKGNKIQLLDNMLRSVKDDEFATDPANINVHYKVENLMKEQVNDILDQVGRVIVWNNQNINMYACPVINEAKARFKSLLKPNVIYTDGMTVADMNKSIGQYRSRWLLEMDLSKQDRQTDAQILIYEWKLMGMLGVPDILIEFMTSFIPTFRINGTSHETAKLPAIHFSGGAMTSMGNEIRNLLLLSDCIGGNYVAIYTLGDDSLVLMNTKPDLELYKRICASRHNVQNTAVASTKCALFLQMIVARNEDGTYYLSHNFVRLKEKLVYSTYPNTSSDWKMKYASYLMMVGYSTQTKKAMEYSGFVSFPSLGTTMSQRVAANALYNEINDIQVFNIINDIINAKQQVSEEIIIQLPVIMTGNKLKSGMTKVGKYVDNHNKMHELLMQYMEEHTDI

SEQ ID NO: 1321 - protein, 3459 aa, Sclerotinia sclerotiorum betaendornavirus 1
MSQTITNTTSTTTTITDAQTITHKRAFGSLSKDYPNKNHQRGLTWFDVVDPPKQQKHWPKLTPNPRWKKLSTSVNAVGKVELGGETQVMASYNCWQCIFGYDLGINTAISLEMIKMTIMCQPEDAAHIQIQASYANGMLHIANPPGLPTGEMTPELFAAQRKFVEHPIDGCIKLIDLVDLYDEGTMVGFTPRTITEKLANDIGVDVNSVDTQQLKKAISDSVNSRGTRAVTKFTDQAIILPTSCPEEIVNDLNNEFGNATFIRGNKEHHPHIYHNASRKAVTNLLCGWHGRDALIYDIGGNPASHLNAGRFTVHSVYSKNQAADNARHIKWSKQCVAWARRNMNNDSNHSVVNGVANSILKPNSALWCSDGINNCVHSSKQGSFGISIDTLFHLPVIDLFDFYIRNKVFHTVHAITLPNNYSYARNGALKYNEGHWYKKNDDWTIEFNGESLAYSQSVALTDTYLTVPLHNIGEMVVYCKVSGYKGAHLIIEHYLIDRAQLDQLYLKHVMWFNTNMDELFVMVPRINMDESSTVMGRIPYTMEQVVINVRFYERLLNRLMQSYTWDSVLSYAAGLIGRVYATSSGLHMKWNLTNSQVRDHCLIAYWTTNRINESIKPLLAQAERASRDPDFLTSLWNSLKNWLKDFGSQFDPTGNATVQKFIADNKGDTLRLIQMFNSTVRSVESLNVATQMVHSRSVVDWVASSTGVSYRRLDVDIDTWRLNQDTSGNKLTVYDHIEFKDAKPAGVNIGCVTNKSCPHDHKPFHLHLSDLNRRMGNCACCGVVSNLNITKLCTICSDRLPCHGKNLRCTHMHEQLNDECCLSAKCCCEKNKNCSCCGLPSVDTYCKVCQFQPDKSIKSQPAVAVNKDNVTIAPIPLQPNTVKKEASVRFTFEKPQVINPDVDIKDNTLTNHPLADSTNSQFDILKNQQVDEIITFDNETIINNDNTEICSVDADSIATVDSNNDDIQLGNNDVVPLLPEEEVAGTEQLSTLMRAIVSIEDVNPGHADTILTRLPPHYQGGVAVRVVGYTDVPGDGTCGAHALSVALGLNVDDVKHWLTIATGHDDWHNSEELAACALAYGRNLICVDIGDTTIYRGGDQDYAGSIIHGTVVGCGAHWLAGNCNILSYSSLFTNKLMTDYTNLLRAAHLTLNGSDQTALAYSHSDLDIDSIIDMNGSIVISNEGISIEHKGGNSRCQISDKSDNVKMIVGPTGSGKTTTAFQHIEGKVLLITPLRSAVTNSYDYLSNKVKVVARAQGVWIPENINTKDITKSDLVIMTMETLYSGIFIGQDGKNIYHQLVSARAIICDEVHEISPHYARLLTVLPKNKTYICSATMPGIKLDYNCKFDVITNFVQGDVVDYWFNEVKSSKTMPPNTCYIVGTKSECTFAEMPADIKAINSTTINNVDINKADKCIATNIVTTSITMPQVANIIDLGVRITSDVIIKPYLTGVEENIRFFNYSKRLYSWAEMTQARGRVGRVSNGQFFGPCPDKTTRQSNTDAILNSCYTRAPCYSGLLHEWQMVTQKNYDETVSYFNKLGNSFDTKPVWWDEFQSWQNSVAELLQCKNSNLQPVFVDEYIHKEDILALIPNYIGTNPISTSIKHTKHRVGALRYSCAVDWDNVLPKHLYEATDNIDFESLIISVPDSSQFLNIEIDSNEDIASKLRLLAIASILNAIKGLMARGQIYINTNKWSDQHGQYILYDSIEDAQALSGINLSEYDIIGLVDIKKSSMRITHYQQSNKWTGHVIVPTYKTHHYMGQLTDIGLIRDRQSPLVDTLRNSTLYVGPPGSGKTTMMIDENKSSYTTTISSGQLKNHGTWLPPSLIPHSQENINIDEVGLLDVSVILSLASRSNKLTGTGDISQVVHIANETNAYYTGFDSGIELFSKYANKIYLDKTHRFGPLTCNLVAKLGFEINPVNTNKIEEIKGYVCATNDNKSYSKVLIASEPDAIICATNHLARMFRRITQIPVYNIAKCQGIDTPNTLVVLQGGQIDMLANNQLYVALTRHSERLSIIVDPPHAALLTQLSVKTENMISYADALGGASTITQPILDYIVNSNRNNLLNDAQVVNYLRTICALQSGKITPNTLIVIMDQMNLHYKNCPFKFIRLREIKDIKQLECIVSIYGIQCVVYNISLTEERELLCCLLSQVTTNKHIKEYLKSLPSKFMTTGKKICYNLYLWLSKFMKDNAIILSNYINTNEVIDIGGGIDLSHILWLAMNGVRSAFMTLVHIVDDVGSKLSRYTDGSYAAEQFKELLIDTWKKSNPLSLGDLKISNSLISLYKLFRDHLKNGINTLWDFVQYIVSAIRDWWQNQFNANKPTYYELEGTSMSLIATDSPCISVMRNSLDGDHSLIDGSPIFINTQYISPLDNLVDNSATGWEKKAIPSPTCEDCVDDTQEVLDEIEVLFDYEDETNNEHNPLADNINLEPTIDEQIHIKEPSPSEFEDKKEDNKQVKCLCMEACDDWQLADNIVTSLDLNTYKPNLMGRMVIEKISDGIKINLKLPGVGKFNAITKRCCGDNTHLIFVTVNGEQLTLKIEKTASGYALYCMPNVVDVNFSQLEQAIKMLSKLGGGKLNNGMTLLVDSLKITRKFIKKLIRLTHYKLRYLMGTINLRHLTSNRSNLEIYRTICHRLPTSYSNSKFSTRECIGGIVLSTIELIPNNAANRSEIFIAIYNVSGDTQILIFTNDNNYSNYITRRLMTPVEHGNFAGDRSAISALLRLGIDIKSIMTQDNDLTIDDIKKWLLANPLTSMFDVTDQRTYNNAKEHSIVEKHLFADIHNVLDKPLDIKYAFCIPSGHGKTTTVNRIRRSNQEYTVLDVDEVQEQATILHLDFEDKMLNYKAKLEKYIINSTKPPDAVFIHSPICAPAGYKVIIILNDGADVPMDRIWSDKNVCHLESMNNIIHTQSYDDVYNVTINYLNKKLTGDITLENGATIVDNIDSILGDAFMRNDPGYDDIYRLPTGKQDVLNMNTGNIGLGEQRFFKTGPHPEVMRPTVNKIPSALPNAIMTRLMGRVKYRTVDLAIKDYHKLMTKFFIKGYETKLASYTDDPINLNYEDILNWLIAKGNKIQLLDNMLRSVKDDEFATDPANINVHYKVENLMKEQVNDILDQVGRVIVWNNQNINMYACPVINEAKARFKSLLKPNVIYTDGMTVADMNKSIGHYKSKWLLEMDLSKQDRQTDAQILIYEWELMGMLGVPNILIEFMTSFIPTFRINGTSHETAKLPAIHFSGGAMTSMGNEIRNLLLLSDCIGSNYVAIYTLGDDSLVLMNTKPDLELYKRICASRHNVANTAVASTECALFLQMIVARNDDGTYYLSHNFVRLKEKLVYSTYPNTSSDWKMKYASYLMMIGYSTQTKKAMEYSGFVSFPSLGTTMSQRVAANAIYNKISDIQVFNVINDIINAKQQVSEEIIIQLPVIMTGNKLKSGMSKVGKYVDNHNKMHELLMQYMEEHADI

SEQ ID NO: 1322 - protein, 3217 aa, Tuber aestivum betaendornavirus
MLDQGKTQFLKPEPVEGYCWHALGLDYENKVSNHEAAKTMKASLKLNGMLSSDAMTMAMHKKFSPNRQMCVDIDDVVEDYAKKVKQLENYLDEPVNDLDLDYANSGMFTFSMTRYRVSVRESYTTSSLNLGGNVFEKTVVTTTIHVVRHDTGINPKNMLDLLIFYFRTPGKTVIGYDGDSVPTEAESMAVFLKATSSSMQHNSDFQNRLKEKQKRVLAHGMRAKGTSPIPVPQNRIDLVPQLQAEFPQFDFFPSSSLVSPHPYHHVSRMAVTNTLVDYFPSNIPLFDVGGKFDRHIHAGNYNVHSCFKVEDPVDFARGVDNMLSLVKKRLTKINSVRPGENEEAIQAMLSITDGSHKYFCFEDAENCQVKPSDEIGFSMSMSVDTLWFLSMETLGNIYVQKKIIKAKHALTIPDGLLWKDEGKLSRGEGTWAKRNGKLIMNFNGGSHVYVNSVNTIMMYLTSPFFIYEDFVIVNRVDGRLGPYTIFNHHVIPKTDFVETMSSSSLHAVWSSSDPDIVIMKVPKIDIFKPVTLLFSEPFSLVKQEINFKFMERLKLKLLSDMSFEEVLEHCQGLMTSRFLSTTGYTKRFNMTAESVRNHAIIAFWEAHELTEAFQPLVKRASQKIHSLHWWTQAWNAIKQVFIKMGREFDPSENSELTKLIEQGSHRDFEIESLLADTMQELDHLRSIVNNGTSSSIFQINAPYYALVYGDGAKNILTNVNNLLCHPDFKRIHMHEMASNDETPVTTAEFVPCVFPEGFAPVADHSVKHQHVLPFSKNSTGICKSCGIFSTLFGQQCVLCSRVAKCVGANNSCPHAHSKKNEHCCGLDNCSHHEPGVFVNWVTCFCCLIPSVTNPCLVCDNTDILKPLNNPNEPELNNDGQQVLPEFNPDQEETQTINPSKKAEGPSTTKVQPEETGNRIDPNVTNADLAKHVEFKRLDGTKAGAWVLCWKVREICAPVPGSTTYQHQHNCPVCGNTYEHAHSYKKLTHSRRLRDCKCLKPSRINMLMNIMQSDIREKTKTPAKNFPTQTDKTEENREQQTVEGGNKLSDVGDLTPSQPYEHDNGEKGIVEKPSPSAQAPDERSLLESEKEKGVISANNNIEPVGSGVPSIEPSISNFFPVLPLTKEFPWPSSVALGKNKSNEKEEESPQDEPGAIEETTGKKDGEKESLDEEKDVEHAPVPVAVGEKAYEVPPPSIPSDLDSDSENGDFSVAMEFDWGFDGEGFKSVKPCHVMDRELHCHQCRVCGSFYSHSHRFTSVFHKQYLAECPVCESGVKLTVVSTLIDSEGTSHLQDFQDNDEDWVDTMIDYQRQLIKGKFINEPGDLSRTKSSNIPTVSPSLPSSQPVADLPRSSESSQLIPAHLVTLKENLKFMLNENPHRSLNKLSFKPKSIITRVNVLVRTLVENSEDGKCGAASLSLTLEEEDVARLSSEIEECTGKPDFWDKRELGVHALSYRYNLVVAHNSGSYLYYGDSTSDEYILVVHMYSLTGKLHWQQGSGLISPSAREFSDEYNNMARAVVHLYNQSPENTKKVKTFSEIPMMAGWFSNPRDLLAMSNPVVLTLLETFGADFIDGQLIHKSQQFKSSILHYITVQDGLLLIAAPTGHGKTTRIHSELVRNVLSKSGKTLIVTPSRATITGSFEYIAELNKCSVAGRANQQWYASPKKFEKTPWAADIVLLTVDSMYDYVTKVIQGDQRPWGERYLFLDEFHDMTWKYATIVKRLGPEITGIMTATLTPELASVDTKYQVTMKLSAMEPYVEESDDKMGAFVVVGKKTDCYLPETHLSLPHDVNKNLKIEDMTKGVPLNSDSIGMAKLANITSGIGTNAVTTGSTIQHAKLWVDKGIRYKVSWKPENVYSPNRKGENSHLVDVVPQQYSLSDMLQSRGRVINQMDLMKRRFKLITAAGVGPSKSSNYRKKTTKFNKENSFYLSDRDVIDAFNKSKVSDFDDFMIERLEGIMRAGTPGDWKHDTDSETNDGNEDENEFVPEVLTLHHNNDDLEDDEAAVDPLINWVTKVATKGKNYITTAADHFISWLKTTFGIAIGSLKTITPVLASFFRRLIGYANTPCKILIANFLKLGKFSVNLVKRIINWTMMKLGVLIGIDCLEDLSDLIDDMIDNYGVSMDSKNPSLKTFFGHDDQSVENEAVENDMECIQQQRKSQTLLINKCKLKMPKGHHLAKLVSKIMKEKDLTDEEKKLFITGKAVSYCNTKGKAMEPVTWENVCKYGGKDPKEWCIYFTFWHKMIPCPVKFYNLGGHVLAFLGPVTGLWTMKEGKSTDIHWMMDRASIGDEWSSTIAAKLNSIGGSPFEGFKEFLLSLLNSFMGACKRWKDNLAMKYEVLIGKKTKWSSGRRRQGKVIMKSRWYNDERWNIQYKTTLFKKPSSTNLVEHWLYKPDDNFEMDIILTWENKTHEIEIFHSSHMNKYQVERCVKDCVLTSVYSTSIQPKDSRGGKTAEDYYKKLIGRVYAKPTVSDSVNKLIKRVVLNNPLMMQFEAGLQEISDTLVNDRQIEKELMEPGPSTDVTRFYEGRQIIYAPSGCGKTFTTDLLNKEYGETKLVDIDTLLTINDMTNLDSIVWDWSAVKSQYVLAFNNWVKDPNSKGKVLMCHSPEQTGYKKGLIVLPTYDLKKTWAPNNLKSLKRIAKARRGFDVVTVNSYNDFTNAIKDYITCFNDDFEDSAKFLSNTIDSIEGDEFFNLNKDSTTQTLLRTPAEGKVALKNDDDLKLGTERFYVLGNLPEVNRPTLDNAAYSLMNAITTRLHGIETLRKDKIETSEYLELFRKFIVTQEFDSNIPTWANHLIRPNLESTRDWLINKGNLAANLAKIYRYSMSNIERFDPKRARAHFKSENLMKEMVLSATEQIGRVIVWHEQHISSIICPLMQEAKYRLKSVLKTKHVYYDGMNVTSLNSHLKTLKKSKHIICLDLSKQDRQTDRPLLETEHELMRLLGVDPLVIEYLKQAEDKFILRTSNNISSIRPGMRWTGGEMTAIGNEIRNLLLLADLEAHGLIIDNSLTLGDDSMLFCDNELDEEVIKRIAMERHNVRCTYESNHPDMGLFVQLIVGWVEGSGYCATPSWWRLDEKLTVSKHSPGSLEHLAKSHSFLMMVGYDSDTAKASNILGMRVFINLGTTAYERLRLNAYQFENDELTALQVKRNLLSKITNPLIRVMKIKLMVNSKKKTPLYAEDEIKLNFNWETNVIDESMAKKKKDLIKSLEKLISRGG

SEQ ID NO: 1323 - protein, 7156 aa, Almopos endorna-like virus 1
SREEIMDCAKTKEAQPAPGESRERKINYKLKIMGAWSPPIEAQNRVKNRTDYNELYWWDYNHSAWSYSDTWRKLARGKPSTQKIKQNEQAAEEEAPTRKVGSKTGYSRPRPQPARTKHHKVCCTNCRVIDCKHQSRFEWFGMHVPRSPMTLFQPVHPARSGHLPPSISTINRRLGRAAATLILRRKPTIKRRAPKKRPTIDRAALSRYLSSISFDKPAPKISPQVVEPSVAETMNPKRFGSIVLPSCIRKLDRESCAMDFQRGEEWAYSRLDFADTAKVMVAENRLLGNSIEFSCKCCVSEDKAREIVTGMSLSAITERRAVKLLRVDQPDEDCDLDTSDQGSRCDSDSDCESSDGTDNSSTDAADSDSSCLGAVEAGQVVASNRGRYKVEVQPSCISGKLATRTFSELLAKHGGWTNLLELSCGQTGLHMQFADHPQRFVTNVEGGINHILRCPHCSKCCMNPVNDYQWPDYQPPKKSWPKDLKRLRCLGLKDHAGSWPHFVEANHDAATGKNDYAPGPLPEMFEFLCPWCFGSMHKLVKSPPALYSMLFAAVYNNNVCGTWLSFQMLAGYGDAVAEYDAEYFSDASRTDYNLLKRKYALYKLTEVDMISGMDSLERTSLFSAYPQCSFRRSMTPDNANAQLLTEFNCCESLAMAELRAFAPFTTSLYGRADFSDGCTGFGGLMQSGFLSDFCSSDCHSVMVCVPKFVARPNVCQHMNHNQGRYQSDGESLYMIMECTSIVWRFNLQELNVVYQHMFNWNGMYMVVSFSHEEGVNLRLIKLTKIPNIHKCAQLNKTLSVDTFVATMRMPKANAILRHLYIPVYEEIQFEVNHKLINMIISRNLDGNLNYSDVSKLATAIIRSKYEVHGHNTHFAFMDPSTLVYHIYLAKVLMIRYLSSRGVLNPDYPMAKLLAATAISILEHVMAPKLINLLSQWKTFKAKYLKGLSESVQGHLDCANWDRIEFMCNFGQVDPSSIRAPFSDTEDPEDVMADWDFGYSNLMTDAELADWLENYNARKGGGVRSHGPEKVMEDITVKTDDTRNFYKRLVSQMKLDPMVKSCLQAETHHLMGDGEQNLTWCPYKLNWNARGGNNDSHHRCVSCVRVKLCMDPRNPSKCLKCTGLDEPEWFEHGNCAFCQANDGLGDIPESERVPLPQWQAQLHQRFVGGLKAKPAEPPAQDDVSDTFPSLPPPPRAFGEPQVGLTLVPPKDKVSAAERALRSGQQGRTKLLTTLKQVSAGSKQKTGLNVVDVEASVQKMRVDGKSLALSRCKITSGAPSGPKPSFTNLALDELSEENWNLLLPMDDVANFGNPHWAGWELMVQFGVKDVTSPDLTDPSYNYLGRLPLLLSGSELMFAPLRLGQPVRFHIWLVRLNSGLPEQMNRAVEAVCGICNQEGKKIVVVNTLRTFQTECRAKSIVDLMRGIHAAQDGGQVLINTQGVDRKTSQMVVKCSDELRDYMSILGKEISEFSSYCRDGYVGRITDQGKMDTFWLRPGEYTALNLRANFSGPREYPLELMDATPKQCVINALYVMYHVLLADVFNITGKRENLEIDDIKKVLKAKHLDLLFLEEGDADGLVNVHFLLFSRHSGMATAREVGVMFRKVRPDAGSDHVLIGPDDISFVPTSDKCAWLTEEPSDTLADPKRIPPFDEGEMIWDAIHKAETSAMLPNSFHVTDERRIHFTTQEFMDRGDKKPFIVVPHVSTRDRQGERSTLSFPVLANWRQFPKLFGNFSGSVEISDFMHQPMDIAFGSCDNINSKLQTLAMDKARSLLLAMRIAPSTPKVPKRHDSAIQLVLHSPGCYRYVPLPRDKAGDIMWLHVKDDIIPVMITLNKNRFGVLVDSLRVLRPGPVKIERLHDSAGSSLRFFNQVANLRLTDDHFMSLIEHCEVQCGVPGAGKTRDYAIMASLDKTMILHCRSSKLASRTRMRHPGLQAVGPEAWAANPKTDYSTLIMDDVSSSDILDVALALSNDVKKLILTGDKLQGRPATMFCSGGEHERVSVLDVIPEKCFKPLLNKTHRIGNPWASILSYIYPDIEASDDHETHGYIHKYNGDLAFILAGIYEDHGIPHSCRYGEESVIVLGSMRVQEDLVRDAMKSLSITNYEYMTFAASQGNTYEHAVILKGENNVVGSSGDVFNMTVAMSRARLTNHIVLFPEFHDFSAADVLLGSMDPGRSPPPKPMAALEVMHGGMRDLAEVLIELISEIMISRLQPHQTFTLTYNEPTNCLVLDIFTDGVLEVGLDIDLTNLAMSNPRAGYYSVRMALRMASPFVTPLICKSFMLDLGAWTTENRLLFDLRGIDTTLQLRQFSRALTAAVMEAISQEFGDTVTTGSIIGMITSGGSSMIRTMRRCLLQQVETVGAAPFLIPEERVDALGGITDDQAACDAAPAEPNKDSDGDASSEYGTVLSGSGDDLPPLSNDTPPDQSGCEQTAMTAATPMASLFTGLPWVSTTAQPSGDEELDGMSGQLLQASLQQGRAGDILDEVTRLRHMGLEPNDGSDRLFTTDSWWGNHESIVWSMPGNPSSILMTWSEEPRSYRVSYAGLMDPDPVGVIIATTIEGSWTLALRRLDEEIVPLEPPHMDSLRLCLAEVVNGESPSEPNRVRLSSIRGLLNCFNMRTGTLNVIQGRGADLLAEADVLIRDMAAELSDYNGFEIAGCPSATVFVVALMLEQIGSINNLGLTRELSISLAVLLGSTVREVSVYCVAGQLTGGFISLHTTISSVVARSNVFLHMQPTDAAPFNSEMIMPADIELGMELLDHVHHDEASMVARLHDARIFRSCLIGDATFRTSLMHRRQVTEDARSFLMGVSVESRYKGIIRTLILTISCLDYIWKLGRENDRPMEMYDVVNAVNLLLESFHKGIKVATMYAGRTMMVQAWVGKKMVAAVNSDTDVLYIQACSFGAAGHGLPPDVLIMVREAMWAPDQILKPRQTFLLYAPGLIVSTDLIKTVTAGGCPLLVKISGQDYEIITSPGCGFCCSLSVRNITTQAWAVVAAAYINPARPYRKLISNMSDAEFRSVKEWIYSSSLSGNTNWQTIVDAAAVIIDRLKCGVIPGIWSKVRGHQSTNHRKITSINTKHLMDVSTMGGSDGFTIVMPEYVPNAVFLAFSPLIVYENGSKAIFDPSLSRTVNLTQYSSVLARCVTFYQQNRLRTLTDSHGLKWNLWGALDAGWPKNTKLSFDMHRDRETQAFKYYMKIVRRMEQVRHGSDTVNIRVPINLRHEVKTQLEMLFKDAQVGDANINHPYGVAEIAASLLLASQRFDLDASQTGCLVITTCPFLTILNTLHGFTCTCGLFTGNHHNFVAGLDTAKTLCYNWKETLEARDMTDATAEERQKHQSELDDLNNQIAGRGGCWFSETERRPSSAPRLVCLDCVNSKVVEEFWSRRYEVMWMLPSVSEFYRWQHHPRERGDWIVNCGLDNRAYFVSRKMVDAIDGGDPEAIVILDNTLFRIVIFREHNQWVAPLDYGVNTFMELQFLHFNADFMSWDTEGMLRKMTVKCCGRLRAALIYKMAMDPNCSKSDLLQYAKLKAGTIRYNSTHYTKLFSETNEMVLNTVEVVWQENHNVIQELKEHALRISKLRGQGGMRVDLALADRLSDMLLGAFAHVLHLLGLDASISDIITQLKEWLGRRPLNQWTEGLLKVADDMILSTKDYVVPPRRVIGTSGPVKFQTTGSRLEESARVLAEQLKLDNVYSAVMAAAGGLSAVLQQQFGFENDSGFILKFNKVAVATLRAITCFGDKCKSMIEFGHKLFTTDWITVAAFKLFQKVLRDFWDKRDPWRWTTDRSGRTWRTSSDEYQPTPPSSGQPSPAPSEEDDAISEIASLTESFIDITDRTISELMTSGAAFDQTQVMLELVMTKAMVLRSASLEVLRRRGVSLEDPRSREELRYVDQAIWILMFLLKVSHGVDMRTIGIMTLANYFERSIGGETTRTFAERIQAEFGSHCHAFMWRNPSGDLEFNFLGRHWEVPTQGILQNLFHQATRSLKDYKLGSSSGGVAPSSSKEATGVDASEVGEELPPDLMAKLIEAGEDGGRRQASQPTHGEDGGFDLDYFVDEDQTVIGRLPRVSTVEIGLQPTDQPAEPSPAVNPPEPMGVEVPAPPTPVVEVPTPPPRLVAPTISEVDNQTKVWTTCGLQIPFTWSSCHPYCGWSGLTQMGDPNQVFLTERVTVHTEPEAADLSSRPLVWVVGPEFEGDSDAMYDAFVLSCMTIYYPGTVRSFENIASAGYIRFYLVVVLVEGVVIESVFLTRSRSFAPGRRMVDCDSLRSVQDCLPSMVDLLYVQNDDGEEFLLASVICMITQANRGRKARLIMREEPKHSCSVNPCFYPVASTLQTQIGCHPAAMEWYRSPDTAKLPREPSIMELIWLSHNLTSASNPELSPTSLIPWLQRSILDLHKINPADLWTGVTKSSDLSYCVKGLQMVVGDYKGRVLSLQNRDADTCLLESITNQLGVSVSLSEMRDFCLERNNWAEDHVMYLCSLLNRSCVIKLRGRTSCFLLVADTSSSSPVVKIVHTGRVADALGRPVTAGHWSPLDGEMTLSNLHLAYDLSSHGLPAVGLRWLVWKIAKKMIERGDALVRVSSLCLNIPDPASVSVPYGSGSMAVGSTLPPDDSGRRLQVVAAIAARLVGARPSGLAPRSTAPRACCPMATSETFVWPQTKDRTSHVIGFYYPGRDSPIDTRCCAQFLSNFYLNLKEYPPFQVTFPNQVSGTFTNGEAAFQATKFRSLVDQFSKMTPQQAFEARNRYRQLADMTYSGFKSNWNAMVAVLDAKFSGDPLNDLILTGNHFLIEHNNKVGKDSFWSDNHDGSGQNRLGMALMMKRYKSSPSTSDDWGEWLTAMIDASTGKFVDAACEQVWQESVALASAICRRKGTPGAGVPPPGPGPSGDHSESGGNKDDGKGKSSGSDGGATGPDGDEQSQGSKPLDVGSGSPILHAATHDGAGEGSDTGDDMPTLVPVNGPEPPGTPAQEFSKQAPTVAALSSDHSLIEEEANRSTDSSDQIASDGAADSQLQPAVSAAVRRLLSAGFDFSQIFGMATDTMSPSFGEDLIIGGGHQEECGTPVEGAAPGPGDLAESGWARPGSPLDCGQTASTRGRRALQSAGNLMGAMSTGLSNSIMADPGDEPPPASSNSDTTLSEVELEAFDSCEETVVLAPGHSEANRGAGSDGPLLVADQAGSLGLPSGDDGASQLSSDKLVLAAAEGESGATESDSTPTKEVEVVDTTPKLLDKQDIISVRTHSNILLALFGTRGDLYWYTKIHNHLCNMGRVDHKVVAVRTHCDHCPWLYHHAEVKVVSGDFRELFEVQHLVGVTQMSLTRSIQTDMIKVIMGWNLDLSTLLVFSHMGLFLLNEYLMSHGARLVMVHAGIVFKQNVSPSAWNDAHWCNALVNESTSKSVQQSSKLHLQSSNVFGDCQNRWVPLEMNFMWPCLSVRGETYYDKPVDHTIDDVSKFLRPVNDWCVLVDCGSLNSIMLEHCKAICKSLANLGCKIVVVDSPKSHVLISHDSVTDYNSVDSKEFQVLIHHGGVGSCATAYSKNWFSVVLPGMFDQPCWAALLLTAGLGTFLLPDERNLTVDEIIVKTQQFPSQKMLVAAAEGRTPSRSWQEALLNLKFEADIAKNPQSLPSNMNQMYLTVPELIDPEFEDGPEEVWVFHYGSDGDRYWMNQVVNELVTKTTDKIILFECLDGRTSWLGSLIDHPNLKVERLNFRQEDLTDLYFDKETSKLFEYIDSTLDRVKTIADRIKGRGRPKKVYLTAFDHSMHALIERCGVQYVTVCTTYVSKRWGYTVPNMDPVLSIYLDGAISTAMGVYINEILHCAGFPHDSNCVEIWVMNHKKEEIRVNSRKVVVKDYPDLLMGMKVPTTDSLKGVVAVDDRVAQRMTDKAKSWLSTNIGKVVTIGRAVTNEDGTVGYSPIDLRNCLLYIHHGSNVALKVCDVLGIPNITFPITEEQRHNGIIAEKQNKSVLMNSKSNMDQIIAKVFNCPMEPLHPGQDFDSQRFTLDLHNIQFLPSLSSYGLNLPGLFTGVALVHSFEVQDHSTGDDDCVPANLLSQVADATRSELLSLLTQGGEVNGDLVLDACIVAEINTVMVRLNARREMVASISKVEPSDWFVVFQVLDNSSGGCHILRVTSVELDTVKPRKVGPPLHAPEPRINYGINEDGQRANITSSAYRIPNWLLATRGSPSSLPEKQLQQISSMVNSGSYVARMSRIFNQVCEVTLAGQKDVYRVTTDNVSSLVSGAIYVALHIDGRKSAVLCVWMDSRFYLFGGIDTSKFTGKIQRTGVNFKPPKIVDGVEMPLDKVSSALTPLNSVTKKYMLNHPTYHTLVSIRPTARLVVSHFDNRKHHMYDEIKFLQRYPNDMVMYSKGIPKGLHERWEEFRGPCRLTYNHGLKVVIEAYGKLWESLIEFQSYTLWDYKMIRIGNSLQSADLGAVVEREGLESLKTKITEVNSFFEPRDEVTWQLKPKPKSRVKNATTGVIELVDAKIPEEFVLDKVKMHLMYKEKLHIVLDKALKGPSLINRTTTDVYVVNTGKTYGSSLASKPMGFWQLSPSEIRADSYSTTASMDWWEVKMDGGPKFHVSQSQPQFAQAGKKEMSSSSWALLKNVDAINPLSTGSTQSGAFFDSGSHQFRQFGTFTAPLITEIDNMEDRIDDDLMLENINYWFENEMYENKKTAPASSRIIEQPRKIITRSDYKYTMTELPLWARPVVQKKLNATFDTITRRLYTVTKFRKFELNINAEWEAFKVYFRSNYGELLENFKANALILSADDIREWVESRPDCNRIANEMEQLLTDAFVTKKMNFVNVHDKVESLLKDKVDVNFYDQMIRAIVWQPKGIAGLFSPLFKKVKERLKSLLGPKFFYADGLTPVDVNQLLMTVEGGDNVVENDLEKQDRQTDHNTLKFEMKVYKELGVPPELVDFWYTSHVQWRWKSENLSGTLDAMRLTGQATTALGNVIVNLLCHRRLVSQHYHRIQVMFVLGDDNLMITKGRLNLSHLSRDMKHYCNMKCTVSQKPRTGVFLRYLVYKDLDGWHLSPDFIRLKNRYECMNGVSHADDKVIKARTMSYCSALGGNRVTDGIWESCGGDGKLLRWYSQWDAIVACADHYDISVNEVMADYNRLLHMMSNRTVFAHKFSYFTTLRSNESGHHLGNPMIRGSIAAKSL

SEQ ID NO: 1324 - protein, 1601 aa, Althepos endorna-like virus 1
LPPGQPGDDAPADGDDLELGAEAVAERGGAHCATPHSATDCGQEDAADSKGRSEPDSATGTQPLVAAAGSGDSSEPPGKCQTHPGAVHLPSPVQLAGDSPSEAATPAGVDKPPALILGATAANVLQVNNPQGRSPDLGKSGDTPTAAADDQEDTEAACKNPIVNLPTEGATTSHAMSPATDLPVVDTPGTPINPQGGPANEASTCGKLSVVDWVVRYQEATGSRAWVEVNLNIPVSYTKLTSTLRVTVGASVDSDFLMINGRRVSERDFDSVVEAKLSVFIVYHYTLSSQFGPTLKNERLLALDPNCKIDIRDVTTITRDCSAAVTLTVLQYDGTTMRLSDGSVHQALPLIMPWGAARGKSAKNMDLLWLNDPSDQLGDFKLNGFDVTQKKPEEALVTEMDVYGAIVCNKVDAVFLTIVGLGYNALLHPEVAHKHYGGDLLARGNHIANRPNVEALNYDIMAGVAAWWSILSEGNEDVPDTIAEQRLTVMPDPKSSVSFEYESRVVSAYNEVEVPKDALCVEWSMKYAYPDIDGELLKRLAKPGTENQVYATILTEKIPCVIINERGDVTFALTRGQPVPHFVLRMTVVRPNPQAGPGASLKATQMHLAPIEAVGYSRQRCVRSGHPEELSISAGCAFMRRGMSWDDIAHGLQDRTLPDVWVHGLTSAAEWSSTYHKMTRQKNPIQGVILSVQGQLIRLCSDVTFRAGSVVWYNTTDGLEMGIVVVTEPGVKHIIRSGYAAITCTILYRTGSVVPNWYPPAASMEHTRGALNNGTLGVCATHHVPGLRVTNECTELVVGLYDNRSHDKYDDYDILSSFRFHEITYVPTALTVDEHEFMLDRGILAMMYDSGPAYFINTSDSEFNALGRRHSLDLDVAGVIFRFEYGNYRTRDRLTCSQRITITRLLSAGFVSMGTGYVWKSQFNPIIDYTRNGVRYQDYRGSLRSVLGTIKWSWLLADHDMEEGRLYTVSGPRMLIKLGPGGPFIGLREVHELVNPVSEELYAAGLGFKNAAGSNDLTAFHAEDFKRKLLEVKDVSIDRTELLKTASRAIGWHDSGVDAREVCIFDNVGSEYDGDSEMLVRCDGNRWELQLHSAPHHNDLTWDDMCKWLNLTGLDINQYGPATYVAPLKVREAVPLWDKTHKYSMVRFPSYSVPAMTTTSTGLFNAITGRLANTQVLRTVEPDTQYEVEQFLRVICRDDALPITQAYRANPISFTPEKIANWVSKRKGAAGIAQDLNNLLIDGLMTRPMNSTEHFAKLEALTKELAPDTDLASMVDVQTRAIVFQPKALCAMFSEIWIEAKARLKKLLKENIVYCDGLTPGEVRRLVKQFKASNAVENDFSKFDKTQDHKCIDFEMAIAELLGVHPGVIGLWRLCHEKWKTRSARITGYFDAMRLTGQATTALGNLIINLYASRELIEQCGSGTILVLVLGDDSLILCRHELELEEYAKRCAKKYNIIAKPKQSTRVGNFLRYLFLLTKDGIEMVPDVVRYFYRYQLTKGTADVSDDNLKARVMSYCCLLGKNSQTEAIWAATGATSELPSWCDQSLIMEAASAYHGLPRETVASMYQGLLDMLQHPTPYEHIIEHWKNAKWTGSVLKASR

SEQ ID NO: 1325 - protein, 3871 aa, Arthrocladiella mougeotii alphaendornavirus
MAKKQAKQRHHKFIHSGHYPKGSARNEIKLQTLNLYHYGLEGAPSNFPTFTKRQCLKGENQYIDTYLSDMNDVVNTRKLGITGVIDIYHNRKKYPVDTPYDAWTFNGNTSHFRNGKYWIDDYYGDVEDKLSFTNYRCDLLNDIYSSSHTHGTKRKYDLINWLTDKSVAFPYGNMAQKRDGMLELLPGYYLRCSHCECTTYLPLSTMLPHTLTRQQITDFLRQFRDEKECFMPDAEIYGEMAMMIPMCFATSSGACFNCDNDLFSEELEVCAALYSESVAYYSRIRGTQLEEMLKLNMLQGAPPDDMPTAAKQYNELHNRQAAKALSKVNSLYINSLYAMSQRQRTDMMMERSHISMSTASRISNTTLEPFEAEEILLVADLASMYVGQLVHYPTNINTQVSLRDICATICNGTFFNDLEMPINPARPPATYVEVVNGTMDLAGVIDKMIEGAYLLIPREVKSGLYEYVDNEYYYSATTCSTVPVRWTRAILDMFHDLATLVIDGQHYHVHTVTNGQYMQIITMTPASDPSHIRTMLNYAEFEALVPVYDVDNPLSTLGVFGTKWEYKTINVELLRRLVTFAITADKSSSAIEAYFAGIISTHYTIGGKVVDLTNTPVTEGLPEILYAMLILSNNKLVMTWASTLHLHNYSLHSGAINIIDFFINRIAKSFISKLEESNPWFAKILSSPTEFARQLKDHAEKLQFDTVFKNLMPTIAMDKQHTLGHSLSSNAIDTPSACTHHSLECTHTIGQLNCVCCGMQSHTPLCECCAKSSVCRHACRHKCTNKEHFCDKCKSNAKCYNRAICNCCGVYGCVPCTHCPEEQQIIIKGPTKDIASKIVPIITNNALKIPKKHQMPAPTSSTIKFEPSGVDACIKKTTNTYTFKSKGKSYTLLADAMGIKDVNDILICVDGYLHIPMLAFTGIYHVPIELTDNPVSDPVHTTNYCAYTCIANQSEYTTVQLQNIFGDRPSLDKIELIELLKSLRLNCLLITKKDEADIIHYGQQASPYMVILHGSCAPGVNHNHWCIGHIPKFTEMPTGYYYPHSLGPAPRDLGRYNMWKAPAAEAAELSKLVQVIRKQRRGTALESLLLPTVIDRGGIYWLTNSKEHNPRFGLINIPLPPSIDQVFVDALNGVSDKQIDASYANFTNEWGNVEQDINNAIKLRCLEINYAMRQLEQPTNDLPLSTVDIKHDNPTIELVNMGRLKPLDVVTLLHDGKKRTAVVFGEASNPMVQNHFGKGSVLQIHKASLSSTYRALLLAIKALGNLPNISSMKVVQAVDGIAGSGKSTTIRNMDKKSNMVLVCKTRSAINSHSTAGFHASITCEAAGMITVPTFSVVLDEASMITTVELAALIDHPNMQVHMFGDSMQIGAKDMSPIKGMRQEISLLSQFQHKKLNHTHRFGNPLVSHVLKNFNKDITCDDDKVTTYEQVSANDYHTVAEIARKKKVDAIYTFMHIDYTNMVSEIGDEISVNKVHSAQGKEFDTVMVLHWGNFAAEGTIVKSANFIFTALTRARKHVVWVLPSSVQLRLNEIADITYEGSGGTDTTLSAFDVESCALTRPLTKVEIELLSRVITSNRNYDPAVCVHHITANSIRIQAQLKYLGAKMNVDFTVDRKGFHPNNTCTTAFKSTIKARIAQEFDTNFRHINTNVNELQLDTKVPTLKKFKLTFAEAAATDMYEPSRINEVIARSRASSVLSDKDEYYDAIQNFTPESYSHSSVIKSLYLNKATWSNIIALADVALATQATGSRLQTIIRNETVYISVFGGCSLYCGFKFLFPSTCVVVSSAHNTEGRDGFLNTINCANRHICGIEYDVNAVLQFITNSKIFAAVNDSLCINRWQERFNNMVQGLFESCDFSTVGTRHKASNLELAQNCADYCSSWVIPTHQAVSMYFVKDHDHYASQPGNKKLFTIGEMIQHNMGIQGDAAVFDVNASNKKKIEKILIRHMNAEEKFDRPTYVPHMMVKSALHSEFVQQVGTNHLVPTAVGCETTSTLHLAMVVAANVLKQMLDVDKIHHVGVSGQLFCLNHHIGDTISHYADNDTLLIKNMISGKLNALMERQDAPISQEDQESIKTNIQYYSDPTNIMCFNKDSVRIVHPALISANMLGNVYTCVPIACDATLHMDSNGTIHEIGKNGSTFKLDMGHMQVVAIIGNYYLCKVVCKPIKVQLAGIDLQLNNFRVFKSSLDNNNTIKIPDPIFRRLVARAFAEKDTSINDMIAYSRSLLNTMTYTSKGYSYKYTDNPLDLLQFSIVALNFAQRNRKLTSFIQSLLGAELSEGSGNKISQLLSGALKTIGLKLLQGPMNSIIEAVHETIGAITNNVPIAKDIYSILKDVNYTEIHPKKQVIIKKTHNAHDDHDGEPSDDEMGIDWNDAGNHMEKGGVDEKATPSDNEVTRDQKGQELQRDKQSAGQHGQGMDKTAVVGKPAVNARKWHDIFGLNKNYQNGSKTPGRQVCLLYAGSRGDNQPLNAIAELCVSMGMSVVAVAPKDIHELVPGVDYEYYIDSYDALTIAGVNQKMPQLSTISEHMLAVYRTWFKHHKAHDYVFSMFFADEADMVHANVKNFRVIPQLSETWDPKDKIASTGKWSIVRKMLGIQKPLVQPVWSVPSAWHMDDTNLGYLFTKMQLSVDKATDMALRFCANHDNDVTVVTLGPMVPDNYQATIKNMLDTTNNAVIFVTAKLHVLQNQFEFEGKHYRYCDFAMHQRILIIPKCNYLLLKGKITQAKHHFGAGTYATFSLIGVKQVAYPQAFDQKFNAKHYSIHREYYDYSPVKEYNRSAKILSKLLDQKPPGTDIEMLDYSTLTMPVAPVNTTDEITAQQVMVRGLRPIVNNYRTNCVFNVLFDCLTDNSKLCTMVESFMTVWTFHTVQDVVALLMIIPTNAIIVGPEFSVKLSRKGVNDMVFIQINTSLTHANTFEMDSVEAVSMQVGASYHHTMLSGEVETDNAFLLTKLSEYAAVALQNDIDNMVKTTMRKSMPIHSIESVNYAGGSKIKERLAVGYKYLCIGSKGAYYAISTSAVDGSVHLVHLQHDTYDCVVAIRLIKEYHDTIATSKGRIKNTKIVAINHATRKKLYTRGVCVGNVGVVGADKLYIYDTWSRLHHHEMEKQVIAEAKEIQLVPESNDVPMVRLHNIKSILLSDKYPVCVNKGALFFRLETENDATSRVCGDLMHARQLTKDLFILPYNGKLAPLIGNAFIYDGTKVAYANIKDVEIPKDLHAMLSLSQVDTPSVFSLCERMALQNGYMSLSDCPIEMTRKKLTLEELSLTLRRKMSVFGDVFVISVNSWAFQIVRKGSGFIYADEQVTLDIPDSKFNVSKYNTVSAAAHTTGIANDMSSLLPLDVPLHAPPLDVDCISYHAKENQLILVANVEDLSTPVDVMRYDDIPQSNVIDYWENNELLDSNVILPTNKNFRVTSRIQPIRVKRNFYLTMEDYPKFARPSRSKAYAEELNSITNRHGAYKVHRTVNLDTRQEVEMFCANYFRQGAGTILEQYRSEPVEFNAARCQAWIDKHNMPMSVKRDIREMLEFGWERKPINAMEVHGKTEQTTKFKTTRWFNEVATRSIVAAPYAVSALFAEVFMEMKQRFKSVLRHEVFYSDGSTPSELAALIRQCGDFQYCTEDDLTQQDGQTDKQIIAIEMEIYKMLGLSGNVLAFYRQCHDNWKWKGHGISGVWDAMRLSGQVTTALGNAITNLIVHNRFMLRNKNSIRKVLFLGDDIIFLSNVNLKVANHGTETKELYNMVSKVSARPYVGGFISMIVYNISGKSGICPDYKRMRHRYSVCNYTYPVDETKPKVASRTLSYLFMLGKNEWTQQLSEKMGYNLTLPQWYHQDTAIAANCEYHGETEWETRAHISALRNMMEKQLAHRKQIMTWSAI

SEQ ID NO: 1326 - protein, 4394 aa, Bolbocoleon piliferum endorna-like virus
KMAKHNNKTRKDPKIIEQRAEREAARKEEWMCDKGWKGLTKLEQPEITHTNKSKLKLLSNKEVGKKVSTHLDGEQLSCQTLRNRFKSIAKKQGPTSKRPNIPLTKPQLVRVMNERIKCGGEFNHIVPIYRAFIPFLTDDINNAGWININQILIYLLHSVAGVADRKLTPEQYVTARANLDCMDLRADRPVIMAEMSGFRPEADVFYGEGHENGCKWVNKLITDLMKRHGGFSKLHMLSCERAAIANPCLMVSKNPEKGTGDTFMTSASTGKLFQCRHCGGINHIMEAFIDPSAPNMAEDKHCGFCYGSIAYAPEQLIDAMPPMFGLPDVYFMDEHMGSLLHELGVMGNLDAISDRMDITPEIISADLATIMLIKNKNNPKQRLAYAGATNCNAILSNNVHYCKASGVCTVDANIHQEKLEIMDYVLNSENITCASRNDWSSKMDSLLKCGRGDVSYVKHDDNSPVGLVTIDNLKSTSHVQGLDHIYVVSPYESNKLRNQIDCVHTHKTDKSLIFATHGCSETVIVPKTLMYELNEHDFVSIDGKFMSQKTIAQTDNYKVYKLSLHTGVIPSIVFQVHTLRDNWSLPVPTIARENYISGAMMVIKIKHVEIDVEFLEQLYAYNAFGEYSPKVVLEYANNLSKQKYSVKGKVVSYRNLSAVDVVQHAMVACILQKWRMGNVMNSADSMTKYQKKRILDKSISTAKDMLITGLLKKLRQIMSRPELLAILANFNVAMERAMNSEEWYQFSEYWSNGRGKRTCVANTTSFVWPGVVLTDDDQLDPEPQMTHGLPEDIEYKFKEFKAAQRGRPKATPSPPTAGPNKESTTLATKHAKAVNLTDTTTVDPTSPDIVDVSYAAAVRAEAGSVNTTVAFGPMYDTILSCTLPEYRQVSMPSESTNHTLRLVQSCKQTVGLNADKYEINATRVDITTINCGFQCIMFNTIRTYNIYTLMQATSKTHDFALDDMINLCINVNLNCFIEVDGTAILVTADEFSAEYHCIRFVMHEDEGHWAPCDVTLTDGVTSIPFHNSQHNSEYKLAFLRSNNVMNSTAYWNLDKDSRRKLEVEMMLCARTVTPDVSDAILKVKTTRHNGKVWMFMGKTFDTATHKCLVDDNRLMELAWFDKSLAELEVLGVTDVYNKKKLNAYNAGNEIFNYGKFMLYQMALWRDSATTGVIHDVLNHKVFSCTLNKIADKLYIIPPQYKIKTGDILSIEHKHTWLCKVAKPRGRTTVIHLECDTASVKVRLKLGQSYSSLAIAAMSAFSHIAPPGSMVKAMDGSRGVIAPPGWGKTTDIISNYDPANTTIVVKNHAARDALSKALNKPVLSVERATISKITTPTLIIDEASLVSDIELYTMLTTDVTEIIMYGDSYQIKHSDMSTMPGVRHVDNALNQCSNVTRHKGTRRIGAPLINELQRADDRMYMLEDGNPVTDYDVVFSQSINNLHVIQTIKDKNINFLMAVYAQTITIVSHMLDEAKLPYSRVSSDTLYIGTVHANQGLQFENVMVIQHGPMTSSRLHMDKSYCMVAATRGKSYLHWYAIDMPGCESLSDCLTNTASAKGNVSSPPHVPVVDWARDMCKSLPFSSVNTLQAESASIKQPKEWDTLGISTAGIKVSNGHMVLNPDQLATLSKCHYYLKRSVCKTAIIKAMLSAHGGRVHEDDHWVTCKFGVMMFGCKIMIHKTLWTMHVSGMFQKQVRNDIAAITIQIDKPTTKEYELNNIAFLDLHELNHELVAVLGLVADNEGLCFNECALAAGMPVMVDETLVHVKKTRGCSVCAGFTVALGKSVILEVDAGYKSWYGRWVAYDCHNSRSLWIYNCLTSRQPMMRTPANMQNILLMERLFAAYSSTWLAGSPGIINLCPFESLNNVWRDRLLLTNNIQVDRVRLNNNHVQIGSRIFTGTKDGVRHVFYCNNDDVMMQAEIANTDQILWLVDRMTMDQNYKKITSILDPSNLPLGGFAGTIVPLDKHIENNTAVARVLLEEKRKIDNISIQSRHVITVPNADYEFYKSFISQYFGNANVVPGMSNGRIGFVGVVDCINLQTYMDAQTVQVVSQTPLLPVVLNAWDVFATCLPMHMSATDWRSQHDALSQICSSTLLPIYQTQLAQSQAANRSTETINGIKSVLDKISKHVDSGHYWSSADGLRMISKPGIIYASVYMLSTPILDTLAKTYPTRDIMGWVVDPTNLESGLSYASPTSIAFHGGDSFQWSKEHLEDILENRPIILNGNVYRPLVQSRVGPIANICLKHLGKVTLQPYISADSRYMESQCVAVRFPNINSDWYTMFNNGKIDIQEYLLDSKIFNMLTKRALMSDTTIYELINYIRQSHLAYFYTSRGSNKKLKTTWHTLVVTAMAALIHANQLKMNYTTMLGMITDADGRSSSNHARMMFGFLNYLAKSTPTNADDFLNNLPTNVVSFLLPEEKMTQLIMERFDYMMNAMKFEIKSNPIKLIKHNGKTSSVLQLADPGNQGRNQAIALGRGLRTVVGAVRFSVTHTSAPGYIEPHIGTTTVPPHAQHSTAKPSDKVPLAETADSRMVPLNEIDTIPKHWISEPVATIEGPKILYAITAMTPSYACPQPSSRAYYNAKRNIKLVTDLVDTELGQTRIDLQSAEDWSVHSTMLNGLSSTLQTVSRARTFGCPCHIERLPFEGFKAGNGMCSMFGPGGALRTDATPYDMTMLVIMMGSRGDAEAWYRLANLTPGVNYHFVVDKHYVGPTLSNVQYVQVDSSQSHAEYTAVRSPLELINQAGLTHIGKSMEKMGAYIMAVLDLISDGSGKFDWVFSSEAFPFLEEVAHRLDAKAGAYVATANVESDGLPCCFIYQDNYPMSVTPVSHTNSHKLFRQLVSSASEHLSSALGVQTCDPLSVASVIIDMSALGPYPGSIYNGKMTRLGSLDCDTTPETEALSRFITAIKEDILIIALGALLLRDHFTVIKRLIDKYSQGGFKVVVINVEVWKTKPSTVGMQIPSWVYDIRPWDETRADDIVSFKNIRYEKIKGDPKCVFVCHGGSGSLASCVANNCVPLVVPQLADQPFNAIQLRHCLLTEHDPVPNHTQLLALQALLLHSLRFSPTRQAMVDNLLRLLQGVSFKMYNVTECLAGIKPHMSITDFDAMVANYERGLEPTMLHTEGGSTSDDDESDAPVYIARTPEPSVDDGSESDGESSNSEIDENIASTSALTTAEVARRERQRQKDKKWALSSHAIMFTPKPQSTGDLVGISADGTADEVVERPLINDGLLPHNVAIDLPEVLCNLKRRPALVRGTCVDPTVMYNEYTNRWCVKKALAQHVNGLSDNTRLKRMIECIDAPLLTSKECINISWMLGLNINVQVGDELYGTSDVNETILTKFKQGSTIGHAMLGTSSMVGDKQPYMSIPYQMNVEPRSTTIKGKVIDYKGAKHSFGKLIADLGGRTHVSFKDVLARCTEPNLAAMADRAQLKYIPITPIRMQHYGYVWQSIGEPTIYQCLLAVGEATYSVVVYDDGAYSWPLNFDLLPTCMCVILTRKSIFMAEKRTIITDDVKHLCLNKATYLHLVAKEPAINWAYLHDHTNELGLVHVWFFDNRSHHMFDERNTLSRLVQANRVRFVPTATSEQVDLLLRPQSTACKVYWHGGLKMAPLCPLKLLTSIKSSDVELTPSGASYVMQQAVQVEKFFNVVGGVWKQKSWKLPEATDAITEEWDPTYYLDFHVADFPCITDKTMLETILYDVAGGKVEDEFYISLVDQFYEKIEGHHLTYRLVDDDSIDSVWVGRLQTRLHVEDDEFWVMNAKVIFMIAKAVVGNVRDYGSRNTQMTSVKFDPTKPPGPSDERNVTYQLGNAVFSATTEPGTTMDKFQVVRATQISTLESLSMRPYDIEAICCFSDVGYGNELVVTEKETLEINDNDKTVTLNMECMDKDVRPDSLAYFSGCEVETAVRYGPTANVSMESSELYGMPGVISKPLMAKMPNRGRPVMPEMANQEFNSVSQRQGDVKHYRKKNLDKRKVWNTMCQAYFRPDWREHIQHYADNPIGISDNATKEWLAKRRDGLAVEKELRATLQEGMSMHPMNSINVHEKQEALVKPDPISSLAEQKTRSILWQDKGICSIISPIMMEAKQRLKNLLGAHVIYTDGMTPQEINDWLLAKGVPDNEDCLLENDATRQDAQTDHEILDFEFLVYEMLGVDPSVLSLWRETHNCWKFKGNWCRGIMDGMRLTGQATTALGNVIVNLAMNSALVRRHLASLRFVMVLGDDNVICLKARIDVEAVKNYSMCYWNMVTKPKFNRLACEYCGMCVYIGDNNYGLCPNYERILCKLEVPNGVGRITDEKVTTRILSYLHLVGSVPQAQVIANNIVDINIPKWYDYQASLWCNAELHKTSQVEVLSTVHRILEMASKPKLYTFKVSVPKKWDPRWRSPHGVYPDNIKIAM

SEQ ID NO: 1327 - protein, 4501 aa, Botrytis cinerea endornavirus 2
MSNYTKSNANTMNQSPRNKITNIIDSVALEANNRIMTLEKASKNKQKQQTKSQGTDEMEVSSLGNRSLTHTTGHLTPRASNSNSIDSNSVNHNRYKGPFATLAMDEPLPSDRVERETATDFADIGLSSGNSDKANALQIQIPSSKSEFNEAPTTFTEMGFPNQDTTEPWYVKMLSTFRSSDTNADHYKSLHGVSPASQTVVPWKRTDVPKPIEDVLDNSKTPDTPTLNSARKSCLWVAMHTLNPRGMEQIPINISNLKYLDYQKYKVWRAGVTKGWLAIEIRRDHSKNHLHCLSGNHKEQLLSGDGKLTGVIHWTKMFTEINNESQLSWGQLNWSNPDAGLINFYHTLFRSTNPSISTSLYIHCEKSTMRELIDYQYPGFKQLGKTFALPESFPTPMPLGVLIEHFKLKINLKKGLQLTSILRNAKHHYTLTLIDQSNIELRKVPATFDDSSHLSFRALETILSTIYSMSQDRQLAMNNHKHQKILPKPMVGGKGDCWQQITMFYAYTELWFGRTDRSDAMPMEELYEIIKKKALVEYPMFRFTHEGDNMYHVEYVGLDRTHKPSYKEMWTEEEYAEIMAEVKVKYAGCYRLPDLAIEFKRIIDQKQAEHMSVEIDLAFECTAYIDKMYDLFVRDDYITTEEIDSDVDNFFNAVEAVLTQYEGDNVLLVGAKATVLEKLAHDLNVPLSMLDSGAVRAQLASTIASMSDIAVKPRDTRVEQLPNDTSDLVIDQLSRDYGNFKFIRGSSGSHPHPYHNAARHVITRYIVSLFPKSDLLYDIGGNMLYHVQNGDWHVHSVFKAESYEDKSRYLTYTTAVVKHISVRKSQTNITGATNSVTQSMLSKVLTADNKLWCNSAWGDCQHGTKNHATFAMSVDTLFNIEPSELLKGYIAHKVIMAKHALTVPKAWHMADSGTLMFDEGYWSKSDGNLNVVFPGESMTYQNSISLIDTYIKRPLIMGDSHAIYCRVNGYKGPHLMIDHFVLPRTLVIEQFMKHTIWSNPDTNTIVVVVPVIDIHAPVTLLKQQPFTMEAMVLNIPFYEKLMNRLLQPHTWEGLTQYAAGLVGRTYGSASGFTRQFDITNRDVKNHCLVAYWSNNRSLESIRPLVKRAEVDVHQPSFLQQLWSSLKTFLTELGRQFDPTESDFIKKLVSDNSEDSMHLGLLLDSAFKAIDSVNASTRLDVSHYITNGMMYETGVTATSKCVNIDTWRQNHVEVSHSTVYTLITGKDDIAPVTIVSCKVATTCQHNHKVAHEHVVGNSIDQRVGMCNCCGILSTLTDQNLCALCGSTRLCHGKSHLCKHEHTVINDECCGKLACTCKKNYKCSCCQMPSSLPVCEMCRNAPPPKTAVWDAGIIKQPGTQAETNTTEPTPASNINHPDVTDDISDSHCDDEAVNNVPVGMLSDASRRSSIVSAVVANAPRHMNFGDHPSIIPLNTNITDRAQVQESANSPVDYDDFVNEGSNHSVISFEIPDDTSTINDRVSSERQLDELRKLVPVNNQPINEYGFAGLEALSTVYNAIRFTESASTKPVTKLVLPPNLVARQTTVSAVVIAYGEARGDGLCGAHALSQLCDSDVDTVTTILERVTGNHDWWSDVELAKAAAVLRVNILIATPAGSILYINDSSVRQYVSICTLVSLTGQRHWVPCSSMVDQLYTSDLRNQYYNYIFLATYASMSQDSTKTVADVLEAVDRFEPINIDSASVVSYHVDHEWSNIIANYPNGVFTTLGYEHTSKSFYGQPISNYVTEGENGLVMVSAPTGFGKTTRIAEFNDPKKNHVVISPSRATVISATTYCNDVLNIASQGRADSTWHPKNKNDSTLSSAKVVYLTVDSAYMALCSGKPNATWLKMLSGRCIWLDEVHDLTPKYVCLAKALGSLVTGVLSATLPNVPPVTDTLHPIRTIFAAPDQLDNDFNDFIERGPEKGSFWVVPSSTQTAVMPAERVTQAASSGVKFASVTSKTLANLELATINSAICTNCITTGSTLPGLENMHDLGYRITPELIFPPYKAEIKGVSKMRLFNYKRLQYDMTQLTQSRGRAGRTSVGYAAMSLPAAANTPAIHVELLYSLMVGIPANTRCKDLYDNLKTNKVDFEAIKRERDIAVQRGYDFQNEQWDVLDSWIETVSELYLHLKNKIAFTDGIVDNNTISAAFMSALNTDSKLHIDKAVKRRIQTNMHNKLIHYPKLHNCDCGLLTVLGKHGCGNQLVLPKPEAEWFNMTMEQSYANGSFSHPKSILAIDTSPSARSVNLSTKLSQQFMSLYFKMLNTILHSAKHATSSNVPTNITHGVLFESITSNKHANISELKHPHKLNNGSVLGVFDNNTRELRLECVVGTTIDCSVTSPQAIVILPVHTANYALGMALASLTMNITLNTAIAVATRSTIIVGPPGSGKTRELHRLFDSDKHTKRIVSKQTGQISEFKNLTVPPTAAIFADNVETLYVDEFGLMTASDILLLSTKCNVMVLSGDINQKVADDTDLDTSTTLDLSWFRNNVGSTTVFNESWRFGSRTASVLNYFGTLGPCHNENDKGIGMVQFNWLTKKNINTIIIEHDIQLIITHSNALVMQIKQILGTNSNINCMTTGRAQGSQEKRVLYVAYGNSSETYTAAELYVALSRHSEHCIIAADYTFEATAKTYGFNKHMQDVESMRYGAITGPKIRDLSVSYIMEAWSNIRFNYHKFAEPKYNKAFDNYLGYYNALSHCAEYLTSDVSDTNGLDISISACVIYNKLYRGVDDSEFTQPLSPQHLEVYNGMTNIFNTFGPGVTVPVERTAKVLSEYLRPIASVRQYYIIPFSTNVKLVGNANNFTSYALCNVLTGEIVMTQTNNLTFQLPTANSLRAFVESMKNNVNWDKDMCVQMSVSEILFQRLKKSIVKSYQDMANTSESVHNYTISNIPTLYSLSCRKMSNLPKSLTLFETIADSLQNNSPSPNQMITKVYLDAVNQLVEGDTPRGSSLGYTTLSEELIYDALVGVLREFYAHDNIDLFISQVCDITASSFEVSEPTNNTHVLTLPIKRLHQTVEHLHKHIHNVVIIDVKQRKIIATLDIPPSTEHYWHIDDLYKRTHALLVLGLLDDQINTYNNYKLNDVLSNIKKTATKAFTAQEQFFSKLLKYIKNIINSLGIKVRKGKEMLNICGLQQLFAARMKQPHEYTQSAAKALYDSYSLATNTLKNHAIKGLQHLVLGHVSNNYEIDINRQLQRTVASAVRMTHDNRAGDDISTSSLLRLYYSLKFYAQGYESGAANIMCYDVFNIGNVKVTINESLPVMLLRRLNDDARNSLMGEANRKQSVKSKRTQASSSNKWDGQSVGLSIKQMFAVDSSNALDDAPFDDLLYELKTTLSDSVSVTTLENANRHGMVKLNSLKMVLAMYPRITTTMLTVTKAYYELYNHVFTPVLEVLQNTIGTGLVKVKNSIIRFLEYDATMADAKLEIQDLRDSLDSVRQSPVLTSLDPTPINDDSSEAESSMYEDANDGISNKIEPSSTDKIHENSVLAEYVKQQLMSGNGSIDGSLFTTCGSDVKTKMVYSQRKKYKSSMFVKWEHQENYSTVHARPLPKITMGTIDGVIYMVVDKVALKLVPTYEGYKIWWNDANALKNENKLCIGLNLLTRIAGDSAGDIIIALITKMFTDVINWCRLTKDELVWKTKYLAGGVCRSKYNYSFSTISLYHILQDSKQFRRLMCHDTRSRFIMVGDKIHITRRTEALVLDCHTYAVASNTATGCCLTIYSALQSRIDIMVRAIEANMVAGLCDYTDRAGKSGLDGLRKLGINIDSNTLSDIDFAKWKVILRDALENNPLSAIFDMGLDDTFTSFKQLMESEKAMLDIESRVDTTVSLLKSKVAICMPSGHGKTTLKGTLLRKYPSIDVYDADDYITDTDALGWSNFDRMMMQYKLRLSDAVGNSGNSKPKLVLCHHPDAAPDGFSIVLFMNKETPYTPERLWKRTNEERLLLAQDKYPLYTVSFADMEHQTMLFMLRSGATPSIKLHAKSELVDPMPYSEAEQFFQSPGPDNLWHMPIQGRLGVNDHRLGTAQQVIYKQGPHVGLCRPTVQMLCSSTFNAVSSRLRGIEHLRKVNFSREEYMTKMSYWFKPNWRDILLDYQNEVVMPSVSASLEWAINKGHKVELIRDMAEAVLNYERATEYTNIQAHFKVENLMKENVDELEHQLGRIIVWNNQNVNMILCPIVNECKARFKNLFNDNLLTYTDGMDMVTLNKHLSKNSRSKYMIELDLSKQDRQTDKQIIDFEQWLLTELGLDGRVVHYMNGILDGFSLKTPDNVTGFMPTMHLSGGAMTSLGNEMRNLLLLSDICKDKAVNHVYTLGDDSLILTDDDFDGKYVAIVAANNHNVKCTFTTSEDSGVFLQLIVMWINGRYIAVHNFMRLKDKLAYSPYNADSDEFKSKTASYLLMIGNHYLTCKRLLELGFNGTVPLGTTMEDRLEANALHNNCDVADILNVIHDIVVVSYGKHESKITITGVGVLSYRHLKSGIHMTKGRQSDTSLLASFQSAVQQELDSN

SEQ ID NO: 1328 - protein, 4501 aa, Botrytis cinerea endornavirus 3
MSNYTKTNTNTMNQSPRNKITNIIDSVALEANNRIMTLEKASKNKQKQQTKNQLIDETKVDTLDSRSLTHTTNHLTQPLSVFGGVDGNSVNHNRYKGPLATLAMDETPPQDRVERNAATDFADIELSSSTPDKSNALQIQIPSNKSEFNEAPTTFTEMGFPKHDTTEPWYVKMLSTFRSSDTNADHYKSLHGVSPASQTVIPWKKIDVPKLIEDVLDNSKTPDTPTLNSARKSCLWVAMHTLNPRGMEQIPINISNLKYLDYQKYKVWRAGVTKGWLAIEIRRDHSKNHLHCLSGNHKEQLLSGDGKLTGVIHWKKMFTEINNESQLSWGQLNWSNPDAGLINFYHTLFRSTNASISTSLYIHCEKSTMRELIDYQYPGFKQLGKTFALPEPFPTPMPLGLLIEHFKLKINLKKGLQLTSILRNAKHHYTLTLMDQSNIELRKVPATFDDSSHLSFRALETILSTIYTMSQDRQLAMNNHKHQKILPKPMVGGKGDCWQQITMFYAYTELWFGRTDRSDAMPMEELYEIIKKKALVEYPMFRFTHEGDNMYHVEYVGLDRTHKPSYKEMWTEEEYAEIMAEVKVKYAGCYRLPDLAIEFKRIIDQKQAEHMSVEIDLAFECTAYIDKMYDLFVRDDYITTEEIDSDVDNFFNAVEAVLTQYEGDNVLLVGAKATVLEKLAHDLNVPLSMLDSGAVRAQLASTIASMSDIAVKPRDTRVEQLPNDTSDLVIDQLSRDYGNFKFIRGSSGSHPHPYHNAARHVITRYIVSLFPKSDLLYDIGGNMLYHVQNGDWHVHSVFKAESYEDKSRYLTYTTAVVKHISVRKSQTNITGATNSITQSMLSKVLTADNKLWCNSAWGDCQHGTKNHATFAMSVDTLFNIEPSELLKGYIAHKVIMAKHALTVPKAWHMADSGTLMFDEGYWSKSDGNLNVVFPGESMTYQNSISLIDTYIKRPLIMGDSHAVYCRVNGYKGPHLMIDHFVLPRTLVIEQFMKHTIWSNPDTNTIVVVVPVIDIHAPVTLLKQQPFTMEAMVLNIPFYEKLMNRLLQPHTWEGLTQYAAGLVGRTYGSASGFTRQFDITNRDVKNHCLVAYWSNNRSLESIRPLVKRAEVDVHQPSFLQQLWSSLKTFLTELGRQFDPTESDFIKKLVSDNSEDSMHLGLLLDSAFKAIDSVNASTRLDVSHYITNGMMYETGVTATSKCVDIDTWRQNHVEMSHSTVYTLITGKDDIAPVTIELCKASSTCQHNHKVAHEHVVGNSIDQRVGMCNCCGILSTLTDQNLCALCGSTRLCHGKSHLCKHEHTVINDECCGKQACVCKKNYKCSCCQMPSTLPVCEMCRNAPPPKTAVWDAGIIKQPNTQSEEKAPEPKPAENDDHPDPADDITGDYSEGDGVINKPAGMLSDVSRRSSIASAVAASAPPHMNFGDHPSRIPLNTNIIDRAQAQEATSSPVDYDDFINEGSNHSVVSFEIPDDTSTINDRVSSERQLDELRKLVPINNQPTNEYGFAGLEALSTVYNAIRFTESAPTKPVTKLTLPPNLVARQTTVSAVVIAYGEARGDGLCGAHALSQLCDCDVDTVTTILKRVTGNHDWWSDVELAKAAAVLRINILIATPAGSILYINDSSIRQYVSICTLVSLTGQRHWVPCSSMVDQLYTSDLRNQYYNYIFLATYASMSQDSTKTVADVREAVDRFEPINVDSASIVSYHVDHDWSSIIANYPNGVFTTLGYEHTSKSFYGQPISNYVTEGENGLVMVSAPTGFGKTTRIAEFNDQKKNHVVISPSRATVISATAYCNDVLNIASQGRADSTWHPKNKNDSTLSSAKVVYLTVDSAYMALCSSKPNATWLKMLSGRCIWLDEVHDLTPRYVCLAQALGSLVTGVLSATLPNVPPVTDTLHPIRTIFAAPDQLDNDFSDFIERGPEKGSFWVVPSSTQTAIMPAERVTQAAGGGVKFASITSKTLANLELTTINSAICTNCITTGSTLPGLENIHDLGYRITPELIFPPYRAEIKGVSKMRLFNYKRQQYDITQLTQSRGRAGRTSVGYAAMSLPGAANTPPAHVELLYSLMVGIPANTRCKDLYDNLKTNKVNFDTIKRERDVAVQRGYDFQNEQWDVLDSWIETVSELYLHLKNKIAFTDAIVDNNTISAAFMSALNTDSKLHIDKSVKRRIQTNMHNKLVHYPKLHNCDCGLLTIMGKHGCGNQLILPKPEAEWFNTTMEQSYANGSFSHPKSILAIDTSSSARDVNLSTKLSQQFMSLYFKMLNTILHAAKHATTSNVPTNITHGVLFENVTSNKHASVSELKHPHKLNNGSVLGVFDTNTRELRLECVVGATIDCSVTSPQAIVISPVHTANYALGMALASLTRNVTLNSAIAVATRSTIIVGPPGSGKTRELHRMFDSDQHTKRIVSKQTGQISEFKNLTVPPTAAIFADNVETIYVDEFGLMTASDILLLSTKCNMMVMSGDVNQKVADDTDLDTSTTLDLSWFRDNVGSTTVFNESWRFGAKTASVLSYFGTLGPCHNDDDKGIGMIQFNWLTKKNINTIIIDHDIQLIITHSNALAMQIKQILGANSSINCMTTGRAQGSQEKRVLYVAYGNASETYTAAELYVALSRHSEHCVIAADYTFEATAKTYGFNKHMQNVDSMRYGATTMPKIHDLSMSYIMEAWSNIRFNYHKFAEPKYNKAFDNYLGYYNALSHCTEYLTSDVSDTNGLDISISACVIYNKLYRGVDDSVFTRPLSPQHLELYNGMTNILNTFGPGITVPVERTAEVMSEYLRPIVSVRQYYIIPFSTNVKLVGNANNFTSYALCNVLTGEIMMTQTNNLTFQLPTANSLRVFVESMKNSVNWDKDMCVQMSISEILFQRMKKSIAKSYQEMTNTSESVHNYIISNVPTLYSLSCCKATNLPKSQTLFETITNSLKTDTPSPNNMITKVYLDAVNQLVEGDTPRGSSLGYATLSEELIYDALVNTLREFYMHDNINLFISQVCDITASSFDVSEPTSSTHVLTLPIKRLHQTVEHIHKHIHNVVIVDVKKRKIIATLDIPPTTEHYWHIDDLYKRTQALLLLGLLDDQINTYNNYKLSDVILNIKKTATKAVTAQEQFFAKLLKYIKNIINSLGVKVRKGKEMLNLCGIQQLFAARMRQSDKFAQSTAKVCSDSYSLATNTLKNSAIKGLQHLVLGHISNNYDIDINRQLQKTVASAVRMTHDNRAGDDVSTSSLLRLYYSLKFYAQGYETGAADIMGYDVFNIGNVKVTINESLPVMLLRRLNEDARDCLMGETSRKQTVKVMRTHANNSNKWDGQSVGLSLKRMFAADSGNTSDDVPFDDLLYELKTTLSDSVSATTLENANRHGMVKLNSLKIVLAMYPKLTTTMLTVTKAYYELYNHVFTPTLALLQNTICKGVIKVKNSIIRFLEYDATLADAKLEIQDLRESLDSARQSPTLTPLEPKPINDDGSESESSMYEDATDGINNKMEPSSTDKIHENSVLAEYVKQQLMSGSGSIDGSLFTTCGSDVKTKMVYSQRKKYKSSMFVKWEHQENYSTVHARPLPKITMGTLDGVIYMVVDKVALKLVPTYEGYKIWWNDANALKNENKLCIGLNLLTRIAGDGAGDMILALITKMFTDVINWCKLTKDELVWKTKYLAGGVCRSKYNYSFSTTSLYHILQDSKPFRRLMCHDTRSRFIMVGDKIHITRRTEALVLDCHTYAVASNTASGCCLTIYSALQSRIDIMVRAIEANMVAGLCDYTDRAGKSGLDGLRKLGINIDSNTLSDIDFAKWKVILRDALENNPLSAIFDMGLDDTFTSFKQLMESEKAMLDIENRVDSTVGLLKSKVAICMPSGHGKTTLKGTLQRKYTSIDVYDADDYITDIDALGWSNFDRMMAQYKLRLSEAIGNSGNNKPKLILCHHPDAVPDGFSIVLFMNKETPYTPERLWKRTNEERLLLAQDKYPLYTVSFADMEHQAMLFMLRSGATPSIKLHAKSELVDPMPYSEAEQFFQSPGPDNLWHMPIQGRLGVNDHRLGTAQQVVYKQGPHVGLCRPTVQMLCSSTFNAVSSRLRGIEHLRKVDFSREEYMTKMSHWFKPNWRDILLDYQNEVIMPSVSASLEWAINKGHKVELIRDMAEAVLNYERATEYTNIQAHFKVENLMKENVDELEHQLGRIIVWNNQNVNMILCPIVNECKARFKNLFNDNLITYTDGMDMVTLNKHLSKNSRSKYMIELDLSKQDRQTDKQIIDFEQWLLTELGLDGRVVHYMNGILDGFSLKTPDNVTGFMPTMHLSGGAMTSLGNEMRNLLLLSDICKGKAVNHVYTLGDDSLILTDDDFDGKYVAIVAANNHNVKCTFTTSEDSGVFLQLIVMWINGRYIAVHNFVRLKDKLAYSPYNADSDEFKSKTASYLLMIGNHYLTSKRLLELGFNGTVPLGTTMEDRLEANALHNNCDVSDVLNIIHDIVVVSYGKHESKITITGVGVLSYRHLKSGIHMTKGRQSDTSLLASFQSAVQQELDSN

SEQ ID NO: 1329 - protein, 4546 aa, Botrytis cinerea endornavirus 4
MANQQQPSKQIQQTTNNHTAPEAGSAVVTLEDASTILTKQQQQENNTNSATNDNYDSNFKPKHVTQANTYSELSSSNTIVGNKRHDQVTRNLVPTHQAIGFGKDGLGIYTTATGFKGPCATLVNNNSTKTLDDTMSARPQTPAKKPSGSTKVPTNFSDIDLSSSGDNLRTGQLQLQIPENTSANEPSPSTFTEMGHPNASVQMPWYKKLMTNYYVTNTSDKHYKLKHGVSPASNTIQPWVATEVSLDVSEVLDNSMTPDTPTLSTLTKSCLWKTMFALNADGMENIPQNISNLKYLDYQKYKYWRAGVKDGWVALEVQRDHTKNHMHIAFGQHTEQLFSGNGKLTGVIHWTKIFTPVNSHTQLSWGQLNWSDPSRDLVEHYTTLFNVAHSTKPRGITLHCTNDLLHDLLQYLYPGMPSLGIAMTTLPNITAPIRLEDYLAHTSCKPKLKTYALQQFALQQSTYHYAIELIDNYNIEIRQVLADFSDNTLYSYRAMTATLSMISLLYEEQKSRYNYHLIKMADSQPVVGGTSDCWMDLMMFYPCADLPSDTRKPIPMRQLIEITSKPTYTNQPRFTFSQLDNMYYHIEYVGMCGPAPGMADEDNYDNCGFGGEDEFEGTLTIEELREKMISVIASSTNSKVGDDDTANLTSVNNPTILDLATILYNVACYPFDLEGDKLGKYQDIIEELVYALQVGGPFVGANKTILERIAADMQVPLSMLDSGAVRAELSNTISKMADLAIKPRDTRTEQLPNDTSDEVVDRLTRDYGNFKFIRGSGGSHPHPYHNASRHVITRHIVSQFPKSDLIYDIGGNMLYHTQNGDWHVHSVFKSSAPEDAARYVKYTKAVVKHAVTKLASANIVGGDVSVSVEMLQSVLTKDNKLWCNASWGDCNHGTDNHATFAMSVDTLFNIDPDELVAGYIKHKVITATHAITVPKAWHQANSGTLMFDEGYWSKSDGYLNVAFPGESLVYRNKIELIETYINKPLLVTNNHAVYCRVNGYIGPHLMIEHYVIPRTKVMEAIMRHAIWTNPDTNTIIVAVPVIDIYAPVSVLRKEPFVMEAMCLNLQFYEKLMNRLLQPHTWEGLTQYAAGLVGRTYGSASGFTRQFDISNSDVKKHCLIAYWSNNRSLESLRPLVKRSEETVHQPSFLQQVWASLKTFLIELGRQFDPTETDLVKKLVADNAEDSMHISLLMDKAFKAIDSINASTRLNVSHLITEGQLVNLNVTSSAEVVDIDIWREEHDSMRTSTVKDMIKTNQGLKKIEHLECSIGPNCSHNHKVSHTHLIGNGVDAGVGPCICCNVLSTLTNQMRCALCAETHLCSGKSALCKHKHTVINDECCGKPSCACKKIYNCDCCQMKSIQPVCMMCIGFVKSGDSAAKVVATDKPVYTDITVNNDVEMAGHEVALNEDNVLWRDNRPQDNEPQEQQNVEDDMGTAYHHPTAVSISEDADDALERDMLFTMNQAGTMQTANPIDPEHNNLDVPHSESSDVQTIISGSVSPISEVHSIELPDDVSNLKPLVDGLEARHIDNLRQLTGKDSSQVDSYGFNDGEALSLIYNSIMFAPEASSKQWGAAKLPPNMGARQTTVSVLIVAYGQAIGGGICGADALRQLAGVTLEDTIMTLKAVTHNHEWWSGEELAKVGAILNLNVLIATPDGSVLYINNTSQDYYYSICTLVSETGEQHWVPCTAIINQLYSSDTYNSYYNFLFLATYATMSGSKEVTYDEVIRKVSECELISTEAASTISNHIDTDWSTVIKTFPGGRFTSNSYEHLSKSFAGKDIQDYTETSENGLFLITAPTGFGKTTRVAQFGGLKSKHVVISPSRSTIINAVDYCNTVLGISAAGRANREWHPKGTKLEALSDKQVIYLTVNAAHDALCGKNPNQQWLQMLQGRKIWLDEIHDLTPQYLKLASTLSSLVTGVMTATPVSRPPNLDTQYPVLTKITHNDVIDMEFTERCEVGPVDGEFWVVPSSEMTTRMNHDEVTKYSASGRNFASITAKTLPEVNMNSIDSGICTNCVTTGTTITKLSTINDLGLRVISELIYPPIDENVTNKRKLKLFSYPRQKYTMAQLVQARGRAGRNRDGVARMALPGGEEQLPLHTELLYGLMNGIPVNTRCKTLYDALRTKKFEKDDLLKRRDEAMTRNYNFSTEQWDNLDVWIDTVEELLKYVSRPISFTDSIVTDTTIKEAFMSSLNKKSTLHISRVSNRNIQTNLFDKTIRYPLFRVCDCGLLTVTGKSGCGNNHQLPAILATSFNNMMTASYVNNTFEHLSGIQAIDTSPSARDIDVRYKISQQYFSIYTKMLNTILHAARLGMSSNLPLTSKNGVYLITAKPDTAYDVSTIPHAHKVSNNSVVGVLDLNTRELRLETVLGGRINAFTTSAACTLIIPVHTANYALNMCVNSLINEVTLNSSIQVACKSTLIKGPPGSGKTKMLCDLFEADTGRKVMISKQMDMLTDNTILALPPTAVFNNGLSYDTIYIDEVSLMTSSDLLLLSSLAPRFVMAGDMNQKIADDTDLETSTTLDLSWFNDNISDVKQLDDSYRFGDKTGAVLGYFGTIGQCHNDHDMGIGFEYLTWMTNTAINDLVIKHDIQLIIAHSNASVAQIKQFLGPDSPIKCMTTGRSQGSQQKRVMYVAYNNPSTVYTNAEFYTALSRHTEYCIIAGDYNVGAKLKQHGVFKHFTDTGLMRYGSPTANEQVTMTPIQIARRLKKDSVRHSAIKFKDTQLNMLLAYASKVKAYYSSFIDDVLNKNVTNTGTGFSVMLCHVYNQVVNGVRDVGYISTLNAANLSTYTALSSALSVLSESRNVNPNLAIQAVCDILKPQCHVGQYVVMPYMSPVVESGSGKHYADFYLLDINECATVYLEETQLTTTEPTVDNILAACQTVRDSDKWDHTMCKKFGVMHKTYLAARSEIAHQCSWYQTINLPLGVKKLANSYPLSIMSACAPTRDLAPIKLYQALEKMIMGRLDGTKTASVSSERITRLYMMALKDTSRKVNKYSPFEDAMDNITYDRLTLLLSKNTIAHDVDKFISDLSDIVSPLISDTNYVILPLSFGISIRGATNEREIDAAFIDIGRKKIIARVNIHNFGNDEWDNNEVWHRMEVLLKIGALDDQICEHSWFNLLQYLKIGKKVRKIMSTGTKHLFGKLYAGISSIMLTLNPTSDKLPSVLNIFELLMATIDNAHRTLGNLATSVKTNVNKVQSTYTRLAQSIVAFYNGEIKSDVLSAIDTRILMTDGFTVEHVIVKVVDEIAKEHTRRSGQLAAYNVPQLLRARESVYCYLAGLGDCASLLINKATYTIRTLQMYINNLLPTRLVLDLNKQASETQKTKLANKSVVEPISMSFEWNGANAAKYIKSGFISEAGSRESEMLFDYDSYELQKTSSDAPSDVTRAGMQNLRVLDNLLRSHPLLTTSLFSLARAYSAVLTAVFEPLKSLWHRCIVSPMRRVQDSIIRFLEYDAILLDAENTISDLTAQLSAEESDSAISVLNLGGNVMSGDSDEESVYEDAVDAVKSMTEHKPSPSDKSHENSTLAAHVLSRIHLNQGTIDDRLFSVQGKLAKCTLSFDKRRQYKSGLMITWNHYENYSTVKPRIGPMCTLGEVAGVLYAVIDRVAIKLVPVSTGYQLWWNDKNAVANESNLQLALTLLSKTSGDTGPNPVLALLISIFTDMLAWCRLMKDELVWKTKYLANGVQRTKRSYDMSTKNLYHNLQDNVVFKRLMTCDTRSRCHMVGNTLHISRRTRALTLDCHTFAVARDDENGMAVLTIYSAKQIRIDLMLRAIEHKICREFISDDTRAGKAGLDGLRKLGINIDARDVSDADFEKWKLILRDALANNPLSAMFDMNLDDTFTSFKTMLDAEQSLMDITYQVDQTMSMLQAKVAVCIPSGHGKTTLKSTLLRKYPSINTLDADDYITDLDALNWGNFDVMMQQYNVRLTEAVRAIKNSKPTLILCHHPLAVPEGFSVVLMMNTQTPDTPERLWKETNEKRLLAERDNYPLYYVTFETMEHQVVLFMLRNGTTPSIKLHANSELVDPMPYSEAEQFFQSPGPDNLWHMPAAGKLRHNDHKFGTSQQVIYKQGPHVGLCRPTVQMLCSSTFNAVSSRLRGVEHLRKHNFDNEQYLSKMQYWFKDGWEQELKSFGADIIMPSIDGSLRWAINKGHKVELIRDMAQAVLDFERATEYTNIQAHYKVENLLKENVDELEHQLGRIIVWNNQNVNMILCPIINECKTRFKLLFNDKLVTYTDGLDMVTLNKHLKNNVRSKYMVELDLSKQDRQTDKQIIRFEQWFLGKLGLDARVVRYMNGILDGFSLKTPDNVSGYMPTMHMSGGAMTSLGNEMRNLLLLSDICKGKAVNHVYTLGDDSLILTDDDFDGKYVAIVAAEQHNVRCTFSTSTTHGIFLQLIITWVDGRYIAAHNILRLREKLAYSPYNSKSDEYKSKVASYLLMIGDNYLTSKRLLELGFNGFIPLGTTMTDRLEANAAYNNCDVSEILNAINDIVILSYGKHEEKMTLTGVGVLSYKHMKTGIHISGGRNSDKSLLNEFQTAVENALDNQ

SEQ ID NO: 1330 - protein, 577 aa, Botrytis endornavirus 1
MHVLKQIINWCQLHKDELVWRAKYLSGAIKREEKNLPITTVDLWHALQSNTNFMRVISSNRGKRSRMVMVGNVLHITRRTPAVLLDCHTFATCRDTKTGCRVTIYSATQNRIDIMFKLMGLHGVNVDHLEDARAGKSGLDGLRRLGINIDSTSISDDDFVKWKDILQRSLNSNPLSALFDMSLDDVYTSYKKLMSNEEDLFAIHKKVDSMAEAIGANLAVCIPSGHGKTTTVNLLRRKYSGFNVVDADELVKDTTVILSYNYELVMQGYKRDIEDSLPNNNKPTILFCHDPVCVPSGYNTIIVFNTQTPYTPERLWKSQNEESLKKQSIYYPTYNLTFDQIEDVVLHAMITKKTPKLVQLSNSELIDPIPSSEAAQFFTDPGNDLLYHMPKEGMVSFKDQNHGISQQKIYKQGPHVGLCRPTVQMLANSTFNAVSTRIKGVQHLRVNDFNNEQYMSKMSHWFRPGWEDKLKEYQEELIIPSVSAALEWSINKGHKIELIRDMVQAVMDYEQAVEYTNVQAHYKVENLLKENVDELEHQIGRIIVWHNQNLNMIMCPMINECKKRLVLLLDDKKITYS

SEQ ID NO: 1331 - protein, 3599 aa, Brachiomonas submarina endorna-like virus
QSATATLGVGGAXKSTEIAQLMDNQTVVVARTTPAQQSIRDKLGSKLNQLRDNVMSLEKASIIKPDCKHLIVDEATQITWIELLCMLGPNTESLSCYGGLTQVAIVDMDEQRGVRTLKPITDYMKRKELWETHRYGSTLANSLRPVFPKLRSVSKHDTSVTIINWNEFMSQSLAGLISVHKPTIILTFTISAENVVRKSQKLASTNIPMARVHSYQGYESSRVMVFQYSPTDPLSGKHLDKFYCCSAAERAKDALIWVRVGMKPTATLSECIDPTINYTGGFELPKHDVRTNFLALLQPLISRPSDHTYKLCKRAIDEENFIGHSNNGACPMHSIITTGDNIFSDVTSEPNHQVTLPRTLDIPENLTSELSKHHLKLEHIELKDHLLSCKISHKNPLLNMVMGTLGDLRCDIRTGIVEPKEAIDKVDQQTRSMIVEWLGSLNTGQPQQKDLVEHATDETIKPTLKAHPINVPQAWDYHGDPPEYTSMSNNNFTSAQEQFPADHLQGLALEEQCTCCNKVAEAFEPTSHATITTRDTVAIRYSSLICSTVNRGQMLFNPTMDQKLGVRSYGGCDLCAGLKFYINGRVKLVIGCQYQDLRTRKIWDTTTTDEDRSSIASGLEVLSLHTIKGHLGWGTNNHYPTIVNPDERTLNMAMHLERLRHTGYFLKNTIFKLNLTNPDACKFNTAANGAWLAKFNGHITSLGFDPLPTSIITHSHYNDLAIYKLTKNNELVGLMSGDMKRACPLTNNCPYLAATILSPTQLLREIIDLKISRMQFLICKPKPIGTTLFAGDGYNLPLEDHHKMKNTAVWREFCRRQAMLSTINIIQPHHAVYLPEPCIKKYSKAIQSYSGTLPVVGHNYPVSKQGFDTVVDCFAFKLVSTKHRTGVIINTSDKPWLGIAASSWNTVAIPTDHNARVDYDQGCSEATAMLCHHKEIQERRVASSTPDSMGGDSNSDNVRELLLTINTQLASDTDGPLLYDSKWKDQLSLVKTSKIKVGFAGIFGCQMELWDIADTLHNHNLNSLYTVQPPLNTTTHNEFTVEGKLGTMKVMYHDCNRSVRPSVSAYTHSISGSPYPYVEGLSLVGVGDGIIMGHTVTCWKLVSSTMTASLYHSPMGHHDPSQYVTICLPSAQSIAGAITTGKPSTPSYHSVPSKLVRMVELRTLRDYSFDDLLVYVRQLMHAAFYGKTGTTSQYKTDIDDAMAVCAYVHVTQTLISRQFDWVKRINSKGPPQLVASAVKDILLLFKPLLQLIPEQLDLETIYHKLVTQLAPLTLQRTLKEWISEAVNNHPRLYAFKRQLFGPHHKTQQSLNHPLNYESQPTMQLAGETVSGPGLTKRSIELLGKTPRNLIINHYFNTTEQSPYDGDHWTKGLLSRSECADMSMNGAYTQTHTPTIITNPGSTMPPADSDQSDVVNGSTGPAQPESHKTNEHANSSNQSEPMVEHPSTSSQSEEPWQAEPPQLEAQPTPLNHNDPPIKKEPIPHPASASLVPFTATNPMPMGQPQPPSHQPMTFQEVLLAIGIDPSVMEGHKHPLDCIPYETLRTKLADSESFRKFVETDTRHSTYVVAEVMGRLMLPTTAEMDTPATPWGPRKDGSDFVHTAYLNKWHVAMYLSLTGNFSIGAMMTNDTKAYVPLDVCKTVITVNIGSFRAEYKSVQGRRVVTLFERGKEKPRVDGPSDYEYNRMQPSAYIRPPMPALQESDAEFTALQHVPERFRHLKRLSLSKSRAQSEPHSNRGRNNRKYLIVMWGTWGDLEYLLNLISADLSSGSQCLVITSERHADRCKSKGCQVYPLPIDDAAWLEVSMKAESDRRKSIWNWRTVAELDQHQTKHKEILERETDKFVHLIKDVTHTLFTPYKLEASYLGELVGATQVLVCSYPWDLHLGQHIDGSPINASLVGAALPMAHAGRGRYPKYLEKFGPMLSCGTWPHVISSYPRVYVIPRMLCANPGPEGSLYLCQPRPTDGPLDTQVEVELGKNTLPICLFSLSSMVDPQIEALCQITVEECRSLGYYPILTIHPDNAKHPKTKYCKLAKHGIAKSTDGTLICYGMNFTPLFQRAIVAITHGATGTFTQAVANGCAQLVLPFAYDQPYFGKMAASLNLGATLTGPHDLSFREKLRSILKCPEQFMEKAALLWPTVTIHPSVEFSDWVTYNKEELDEKYTQLRTSEHMSTSKDYHTVNNALLNSIKSFIRGLPEDNSSIKSKVTGSHRRHTLHCSGCMDKSWRSPRLSMVGTTPTIGHINCNWNTSTNVLQHETSEATLPLDHVHGNLHTAGPATALICDVDIACMIELSTADFLVSQLFSIGSVRFLQCLKTRDSLYGAVKNLSHITQSLSQNGLDSVIDSLTFTLDQPTPGNYLMLQVSPTSHCDKLSELLKLPKLDVSKSNTDSAMADLLYKPTPNCTVIIDENAVEAMVDSRSRNPDAPKATALPTASLEDSLSSTAHKFLRCGRVARPTPNDLTVQYNPTNVAGCVEACILQSNSPSPSTLRARLRASKTLIPLNSSTPLINMIATLNLLAEDYVVIDSTTDIVHYKISDRGPPTMYLLKAIEKNQGHCVIINHSETVWLHVINEEVQPLTDTSNVPLHLCPTHKQYMFGMPGNMCYDTQPHFASAAEALELVHQLSQPIVTGSTIKRLAELTRSDEKDLFAKLLYNNEYHVINRKRTPFILSEFGQSSMRTTSVYSRIAAEPTVVRTLTTQGWILALCIPTGENTSVLLHAPLHHQSFCGLTYVSRIPWCRKGPASLVRPDDLKSCTCLNEVTYRHILQHSPTVAKLMGIKQPSLVTYIHEFDNRTHHKSDDVSWFRKEQLSLRLTHSEATPELMQTINATTDLPVRATIHEGKPSTTVDTETLTAQLVTLSMQKSYRTNNTVIIELDYNTFVKAAKGPSLGYQLVNGQLRCQVREEEFCVNMTYDQLARLLELPVGTSGAEFATCLGFNPVVPDQKGKFLIGRPDERVIPMGNPITFAAYSATTTPLGLITTRPLTWCRPVVVGGADEYQTPWKEPGRLNDPLPDVTWYTGESSLPFGEAAALQTKPKDDSSGSKLPPHIDDYIRNQLEPASMLMATSRPFREYIHTSDVDNDHRKTLMAGWTPDYWASPGESLVLQEDIPIETIDFWSDTDLTDNLIRYGPFSTRVKSSAVPGKVVTSKRVTMVPLPVWSRPVLTRQHLQEFNALTTRLGGVVQYAKGKLNITAEVRKIADAYFVTGWQSMANEYTSNPITYDWLAIRDWLAQRKDKIAVAKEIMEILDMGLSTRPFNRMHVNAKLESLLKEVVIDSMRNQTARLIVFQPKGLAALFSSIFIEAKTRLKSLLRPEVVYADGLKPQDITRRLNNIVGNDLMFVEDDLTKQDRQTNHDILNVEHEIYKLLGVSTGVLSLWRSAHDNWSYKGKEIRGNLDAMRLTGQATTSLGNLITNLLVHADMVISLKSSIKLILMLGDDNLMLTSVAPKELEQRSRTKAQYNMVSSLSVYKDHGTFCSLLAYRNPDGTYGIGPDFVRLQRRFEVPNSSGTQDVEVNKSRVMSYCATLGPLPGVKKLIDMHDLPIKPEPWYNYYGALTACADKYKISRDTVEQHLATLLNTMRLEQVTTHEFLHFTTTR

SEQ ID NO: 1332 - protein, 4405 aa, Bremia lactucae associated endornavirus 1
MIVDPLSLLDCVKSPSQPFQVETSSHLIDMERWISIEHIVLFNPNINELRKVVDCVNKTTNVTICQLKPTVETTQDEWDSKNDEHNTWWSPIYSNEVIKQETEIINLVSSDHYTILSSEKVLINTVVKETNTMIISNIKITQGVPNSLIKKLISFTTDLNKYFKIPVVNTESLIGKFGVPIIKEEQIELDRIFMRYLLNKNMLGNQTYQQLMDYAISLCHSRYVLDGREQNFKRISAEQCRLHTYVAVMIGQLNHTEIDTVVKLVGPDHPIKQMVGVLGLGSMQGLWSVGLEYALNNLPVPISDAISATIEWLSDKSLMNYHHIDVWERIRVWVFEMNGQSNKYYVNSTWNSTENHSNCDHHDLQCEERHELTEKIEEKTCLCCQVYKAQEDLTLCKCCQHSNKCHHVCEHDCTSPLDHVCGKKCKHSKHICKCCKVATCYDVCPVCNESLNWIPLIESSSRQSFTSNKKRGLKNSKQLEDRIVTGKQVEVEKHETLENSFTCCGVTLGVRGCHLQTIKDNKEIIKNVLRTKKPEDLEMFTQDALSEIGLNLLLDDELTQKPILPEKHTIAEIIESTVRNTNPQLVLDESINTTDNQNELIEESGTILPNDQLVNAWLSDLPQIVRNSCITGLERNWQSIKNSYASSDDLPRGGGHIVCCPEGISFIGSSNWISIVKEYDNNEDDALCGWRALNNYSHEVSLSDLRSSSEREDWFTHRDLAKYCREISVNLMIMKGNDIILHNHEPYESKCCLLIHSGPEDSGHWTSVSFVQTSPCPTMPDWVGYTSQEFMNMWLQSNQIREDCKFDELSVEQRIRYSHLLFVQEEENNSQILKGLIAVERIDNDYKLITNEGKELNDPRKGFVNVRIPEQFVNQVGLINLDYDQALLNYEYNQPHSFDEKIPVNCSQRLKQEIREISKQCIDLGICLNKQLYSKPEGYYPIENKATVKSISEGVCRTICIKDNLKTGDTICIKQRDKTFVIRRVKRHKKWMLINYNMPGKGGPLRYYLPRQSLTSLILQLNSLLITKEDTLTTIKLLSKANTILAVPGWGKSTQIAANFTPDTTVVCVTSEAVKNLINMGIPRGNVKSVERATEDRITTKRLIVDECTQVDWMRIHEMVTDRVQEIELFGDSFQIGTVDFSGSSGERTITSCNMYSDNVKQFNSTRRFGEPLCSELKTLNPNIDTITSHETTYNVENLSELNTERIAELINKHHIGVVLTFHQLTKNILQKSLGKTNKVNLNVTDFCTVHSFQGNQKSRVMVIQHFLTPSGVHTDKRYLMSAASRCTNHLTWVTIDSPVTSLILKDHLKNTILIGGKGDNVLDTVTSMIRKKYNNISILGVLRTCIQRLLGEYEQNRGNAVMFKVLSLRGPRVSDIARGYLRLSNLTDEEISYYNLIQLEIQDEVGLHGKLFEIEIKEEKLENHLQYFDDEKPIDYYKKTVTYFGNKLKFNSMLLPGKIEFRFFTCTFRNDGDDIKIIITTKFKSFTIGYDNRIGGFKLTKITIPIFNVLEKFGILGKIKHINPFFKGAQLFTVEENNEEFNESLFERNVKQGIKEYKLLTMQSASKLNKHNEFSEVIKPEVTIEKIRGGKMISKTVQPIVKTNISKQRKFFSYKIGINLEQYSRLTIVADSSRRFFSGAYPVIYITPYGWIEYLMQDGCSPCAGLFVRRDEAWWLIDNDYLKLGSRRIQFNEECLTCKPIIYFVKTLNLESCFTEAYDYELKDNPLVTVNTNGIEPWEQRNNVLDFIDVLQERLCNMDRSTLTTKQVVCKEMVEYNEIWLLDRKIAAADDGIELVLEFDPDKLSVLDYTIMLGRLGKQGIYVIMETDNKFFCPTEETGSISLDSNPNWTRVKNLNELIRMGIKLAGKNRASKLTNLLRHVNNGLFGSNDLEDGLILDLDQHKFNKTAVYNHLCQRLGELKLSQSSMIRRPFYHGKISDSRLLNQLKNVLRCGVIMECPTTMGTSTGSELVMLVLAHMEVKQCTLVLKNPGLLLSNSLWHHEVLSLTEILVEQDIPSERKIFQDHCGHIISKVSNSMQSYTSAGNDNKTNQLKSTLVKLHDAIMNTNGVEGSRLFPKVKIKQNFRNLIVNHFILMEPEKLKNIWLDDDNEITIIIPSCGTNNSFWYGMSTSEDKNFEVHETNGNISAVISQKKLRELKNLDKLKLFGHYRPIFIAGSLFDYIIVKTQIESNTLSKKYWRTHPLTETIQVPLLTTDLEWAIENKTVMKWKTFTCDKAVLRRLEIRANREGTNFKDLCEFGRTLLHSRDYSRVGSWDSVEVDAFTMLTHCQYAYYKSITGQQSVKQMINLLSIIDDKPGNSSIFKWLKKIGFEKVFAIGYNKYKELIQTIGFDLTLQDSMIEFCGFLDSLVNNKNWTDNFKNSVTEYLPKQNLRSCTFLYKENFDRDESNVGKMLGGILKEFVWQPLNKGDFNLKDIMLKGLGIAPNVTKTNNEQQNLKNSEETFNLNFEGLEGLLTPIELQVIGRQPTLEPCIKGKRNLLIVSQGTRGDVEPLKPLIDEWSELFITIYVCINQGNEESVKWNDKVKVVYINMDGSDLSNIATMEVDQLSSTKLHMLKQLTTGLSSSFKDLLKLDNIGLVISTSHTVLGQLVANARRVKHVNLQLFPWAVKPTDKYMKLVLECVSRVLNRTVDTGCESIAELTRETNLNLILYPPSILNTIPHGIGTNIKLLTRNFSEKKCRLTTTNELIITMGSIVGKEALSRYKNGLLWASVNKMRKVYLIGAQFSERRGVETKECIGKIKRKLKRNGVGIITATYLDFSEISSKHTIVIHHGGAGTSNYFSRLGIKQIILPIFNDQWLWANYLQKEGFCISSTPFGLRNLNLNTLIMNTNPSKWARLNQISEPTYYLNNIDLLDWVNECDDNTNFINLWPYIIESIKTISNNISDKILSLPPLKLMLEVATCITNVTKSQTLETDGAIDVIECVDTFDDVIEIPDKSHNEEEHITHPTINLPTHIFKLVNDEFGVDAWNSGIKPVDSLNLSDQSIDELERITVSGGSDFARFKQNYIEAGSGIIETIGTEAVHSGNGGLGKFEELENESKINEVKLGEVDISEKTYIPIKEVIIKENKEEITDTGRFEVIGETDYKYSVNEILESQRLAYRGKSDEGFRKVKNKDETVIVRKPENKSDSINLELAEFKSEDADDQLVYAKGGYTVSNEVEQVNINESLLLESELGEGVIIGFCKPPLSLNSVMDWQQLLNIEESNLIQNPYCCNPEHSTIDGSDLIGQRLQNTNTLYNPLSDGTCTYDCLYWIFNGDGNGILKTWGAIFHSRTWATIADIRGFSYLSGISIIVQTDNECLFLNPKCLPLFALSMETKDGLGHTSVIGFDVDEFKEKQWIRLEKPLKNANLDLGPTCKLRSMRYLGTSNCKNHCHITKQNLGIIGKSLNFNSSKEDIVRWLKIASLISGKTIKDIASRLNGRNWSKLLNRRKTQFVKLVDHQYSNGCSWDLYNCGFKPGDVLCAINGSNISVGVLINRTNDLFLSTSSQVTPVQLVMSLSMNLSPTPYKIPKRINYVGEVKSFFLNRSSMNYCHSIGIKTDVDKIAELDISIDELLISEYDNRQHHLMNDKEIVKQVEESKIVVIGHAERMLSCKWIKTDSKIRPVTIHGKQYIECDTECQLILFCLDKTGERKNLQPSGYRWIINQETLISFRICDTLGELNRQLQYTDDNKVVLTRVKFNMAGNLVKQLKTYLIKNGFSEEGENYIMELESVMMSPQSTWDVYIDTHNIKYWLESLNEKIDYKMDKLYFVTNQGFFSLIGPMVITKKKLLKDIPELVGGYSQIKQLGSQTWDHSMQDLMKTTSHVKHGFKFNFNNEKKIQSRLTQLSNHNSQQRLHNVMDLIDNNLQTKDNIQPINITNWENLAIQEGFDSIIPKQIIDTKLNRNITNDSIQEVPIHVRNMWDDTELLGWNTAYAPTNDLKLKAHIPVGKRRTERKITMCKYPIESRVVLTKVANQEFNAITGRVGNASKIRKYDLNIEYEIKNFCEAYFKEGWIDIVRGYQANPIYPTGESILKWLLEKPDCMDIDSELKMYMEDGFLTHPISDVNVHLKLESLLKDEPVTVNEALKARVIIWQAKGICAMYSSSFIEIKKRLKNLLRPEIIYTDGMQPHEIGNNMNSTGEFEWFLEDDLTRQDSQTDGQTINVEFGLYDLLGLHRGIASSWRRVHENWRFKGKDVRGIWKEMRLTGQATTALGNALVNLTVHWRVVKQLGRNLKKMLILGDDSLFMNTTTTDYTSLRRNIADYYNMKSKAFQYKNHGTFCSMIAYRNNDNSCGIGPDYVRLKRRFEIPSGASDGSLHNIIARKMSYAMMLGDLQPVREIVETMKWPIELESWYDYGSLVDACSSKYDISTTEVEAYLKTLIDYLKQDFMFEVEFDVISQR

SEQ ID NO: 1333 - protein, 4505 aa, Brown algae endornavirus 1
MSHTVAHRHKNTTQGSLRDPKGTKKIRYKQGLSNDTTLLIGKQQSLQLSKYGDKLFKDDIIAQPKGKVQKKLTSLREVFKINKKHGLYGRSNLDSNTVMCPTAISLKSFETMNYSEQDWSEGFTVTQLVAWQFMIDSNKSPWAVTDQERDRFMQEMCLATGNLKLVASAKAAEQMRIRRTQPKLLPAFDIDYLCIDPQMDEETYMPVENVNCPNAALIVKQAFKLIDYNVLRSLYIEWDSCASKFTEVNKFNINGVTSYHCCEDEAIFYQCKNCNVVNRAIDKSCTSAKYNPGLCGVCFHHLEFDCDATVIINDVVKSLQQVATWSVGASSKLHDLTLAGYLDGSQLPNKSLEEHMARHDERLFNQVRTKWWFEIAEIPAHTSNDCKKHLGRRFPSILLKQVNKGSAYNADDAAEFFVLSKIMRGLKSSNTKAIVEKTIDRNWLVENLDKLNKRENLLLLVHKKMLNLGEGVKTYECDAVYPGPEHAEVMRLNLDVIRALNCQYVTLNKTTYRIQTVTESEHWNLISISIHNGTRNKYVIKKTDNLVKTARIPYVAVKLLDMLPISPIHSEEFTIEHNLLRKLMVRNMTGLMDMTELINYGRALAQTRITSGNFVSQPYKYTPKQIIEHSYIASTIMKRLHSQRYHLTNDELLNHLVASGMQIASNLIDNKLPKFNEVREVLTRLGSKFRLSIMKDVYQNPVWDDLSNWAYEVGLENAKIYDLGKPSKLSQPASCNHHTTNCEHAQVSDMYCRCCKTHAPEKHSYYCHCCMPDQCSHNDSCNHKCEGQFEHVGDKICKCCGKPAPVELCSMCNDKSTFNEEMSFVPDVEFTVKHKVKKTVFKKFTTNTSKKQQPKPIKTRVQFTKSEDPVNSEDKKPVSLVENAVETTVDEPWSLVGPSVDDQSLKHILNSDESTFIANIQSLLDEDEIVACNRWDGEWENAINEIPLASGISHLVRMKPGMSQLNQGKWESINEKEAEVTNTGDICGYCCMKTMNKDVSLKQLQSVANCSGNFSALDMLKLCEINNWNMAIDVGHSLLVGCYNPGHDKFMTIKHINENHWVLCQILQLGYSTVGPHFDELDDNELSKLSKSVLDLRSDTMEGVSTVAKALGIARWYLKLSTSPLYKSLGKLEVVRQQDKCFLTNNNEHKHDQYTGLINLEVPMSDWPTLSLLNDLQNPDNLKEAVLSAYHDVPSKPTNNLKPLRTTELSSAVRDLLQYIINLDSDNGEKLIYKKQMLRAHPRTNTVKISSVNDKTKPNDIIVIKYAGKTYLRFLFKSGGHWVIMPGEFANRKVSIAQTKLSVGSMLLRITSVINMQLSDVEGLIESAIVYYGDPGTGKSTKLIAIANEARSYTAVTLTRPARDRLVSAGLNSNNVMTLEKASITKINTEILLIDEATQVTWFDIAKLITTKVVQLYMFGDTAQITKKDFSTTPGTRTIEPAINLTNNKHKLTINHRFGGDLYEELKPLLNSTPSDKAPHTEVIKYSSEEFDRSKFTTILENDLPDVIITFTQRTASILRSELSTLMEPNDQPEVVTAHSYQANDANNVLVIQWESSGNSLTGVTNMPEYNFSAATRAKMKLIWWSISGHTQDVSLAARINDDFRGSGLHQLLPDLMLALTDFSQKMHLPEIGTEVLNLMPERLEKLQNLCETDKPDLTTHDENILRFDVMANEDKFSDSESDGDDDPVAQPVMIQKLNVQVAKQHAQKLVNKYGATLKFSESESQIDVQIIDTKFNSGLVMHARCGKNYPFTVELVHIAMIVPLSRGKIKRMFTDIIAMSLQDELIRPGDPEFNDFKDGSHVRIIPKQEPLCEYDVMLPWAVGIKFRALAHLRFLLPENQTLEVRIDNQLFVVEKTMGCSQYCGLKFYKDKVLKFIIGGSHKANLRRNVKLFDWDSTHPSNELLNNSNSFDCELNYNLYDVKLDFCLALERILAFANAGKSMLLNKLVGNTKQPWSIMTTSNKNINDRLEKAVGTKHMPGEINNYIGNCIMEYSGKLLRLQDPHDQRSTNISHLNQLLQKSQYHEKQRPWFNIIQEILGLNKIGALTIKGLYLSEERHKELRTPGYHLLMDKLSNALKQIYDTDDTPLWLSVEQINTYGQTLREEFPNMPLCPHAYMENSSAERLIESVIYFRGKQNGFSQFALSHFSIPMMNSDLDSTAVTILAAPGNEINNHLNLAKETIKVLEGKIQQRTESKLESDQLQLKLSKLQNYTSGNKTSLLTDYPYEKPIVLGLKCMHNSLEDFHKLLAKTRQLELWLPNITNVTGPYNHSVKDGLDIIYYDNSEDPIQMSKLCNTITTETQLIHTTSDGKYIFFKPTDNIMGHNVYTVEYTVKPQLYCSVNATVPTNSIKLTLPIVSNVSELTRTGKLIRIKTFNFNKNFYEKLMYKMLQKDITFKELIYYARGLTHSYMYSATGYKPQYNVNPVSVVDACCVAYIKANYLIQPFKSYDSTDYLAMLKNATQKLHSWLSTDGTDMLNDNLTTLAIDNDKLATIIDSWVKTSTNEVKPHNRTVYLAKLDGTNANLVDMHKVGSWSWVAKEFSRQRKLINPVLKKKLLGFAKTQFDHKVNQLLSVKRILIPGKPEPVKTTTIEPSSTKLQINDTGFLVTHCGMGKTTLANMSNAIDADQILESGKTNDPAYLAAYWQRLYELSNSNLVMINSLGLFETIKLYNKTKLRCIAILPRYEVQKDLESQKQYERIDYLNTHYNSLSSTKQFFTNVTSERLIANGNLNIKSHPKLKSKLLKYMIEVVCDMNPQQSQVPSCTHNMLELNNKNHIVKMQYKPTTDDEHNKSIISIMANELSIDDTLNCTLWNLMNKMYGCKNFKSNTLVLGRKGLVLASDNLQELNVLRAYIMTSLAHAFDETEFNDNDKVIPGVNDESPEESNSSDGESHTSNDEIIEAVTNLSDKVKSTTYGAVRQHFPSDHTLILRKKRILFVAFGSRGDLDPVILLASAMQQVGAHITIVSHSIYKSELESLHFEVIEIPTDPRQSLRILSLAFDGDLHLLKDILKEHIGSLGAAIPTLESMAFDLILDCPFAMLGCAAGYAHNTPVMFLCPFLFELWDTPEGIRLHSMLNKLGMVSNICKLMEAHDKNFVYEELADFIESNNNIMYMCSEYLVDPNRLPAGHLITGPCYNNRPNASIPIIESMFKENKKIIAICWGSLTPTNTDKIADVIKVVVSMWDLVVVTGDTTATDAWDNNNIIEQHLSGQSVIDNLLIIGSIGYDYLFPRCDTVLCHGGAGTIHRALAHKVKLLITPFMGDQFYWANMVEELGLGCCSMDLNSTNIKAACQRLKQIDMTNFSDDLVESCKGDVNNNLNSIVNFFNNKRNSTLTYEGPLGFCKIESTIPLPRLYSLGHWIWSGDHQEIYNPDVAGFCFKECFEDWLKHGSVRVNDYQSLSQVIKLEKYVEVTDIIGLSMLCKFNLILINDVTQQKHMFITNPLGPTIGLKIMRQGLLSHCVRVNFNTKNADQIIDVPRRAPTSIPETIRFSDHNVNSNITMSINELKDTVINVSKLQAIPAESDLAKVLAKPINILNAEFKFKNLYHTMNRQAKPVTFYNTFSTRYGYVISKVVPHLINRFVIVSDVEARRVMLCIKLENCTVLLGDQPNAHCDYIAVTTTMLKLPELKVKLEKKPLDTNNSIINITSRNYLEKNEKVSNWPVGSTTAKLLHISHFDNRTHHEVEGRVQDKQVFDHYVKQTLLNPDVSTIKYYGRVTGIESKALVLPLKSMRIDFWVGLRMVVETDNPRIRDYLLNEGVWNDLGLQFKIKHNYVVNTKNNTLNNMRIADSRLSRMCELTGNVTKMRQPPLALGTHNIDKQRFTELFRAQEIAAEKFWTSNGCSAFGEEELMVTTFEGTNTTLKAMNHTGAICINCKLHSVTGLITVSLVDKKGGVGKHELMNKTDGIPDDKDVDHDHTGQSTGIWSQTSDVNPTKFTKWWNLPESKVNNMPADNLWGLKSADVLTDTGLESILTNEVLTGDDNEFKQELLVNIEPNKTQTTKFSNTDFDEPDVFSVNLYEDTDLTDHTAKYLPENNVRIKCRETGFKTKLIEKSIKTNYPVYSRPVLTKLNNAEFNAVTGRLASVKTVRKVNLNVGEEVNRFANIYFDEDKRNLLNSYKTDPVGFDYTAIKAWLTSRPDAVKIAAEVDAIMVEGFETNQLNTIKVHLKLESLLKENPVKYMKQLQPRIIAWQSKGICALYSHCFKNIKQRFKSMLKQNVIYTDGMTPDNLGERCRNVQIKPTYNFVENDLTKQDRQTDHNLIDFEMAIYIKLGADKNLIESWLRVHKNWRARGTYIVMHGDAMRLTGQATTALGNAIVNLICHMDLVERLSTRLILMLILGDDNAFLVDGEIDTVTLRRWIADKCNMFSKAKSFKNVCQFCSMLLYKTTDERLELGPNLVRMKRRFEVTNGVHKLTDNNAEMRAMSYAMMLGKDQQLDELVKEYEWPITTTTWYDQLSNLQANAEYNEISQEQVLSYKQNLIAYLKEFNTYKSVYWTVDTEKR

SEQ ID NO: 1334 - protein, 4168 aa, Brown algae endornavirus 2
MVKRSNISKTMSNKKQYTHTASREKSRLAKNLDETIENVSSSIGVSLEVQSTKNVLEGLTPFRRNVKLIKHNAPVSARKLVRERATIQLSQPQEFINNPLLDKFGPHVYNLSRITPNLIKKMMFRFKHDELYVGELPVPLLLQHQYIDYPWGSNQNDADGTKTPEIPSGPGKEELEMYISCGIPLEDLIPPGAMTEETKPLFKKNGELLLTSVLQDINCRFGSMENYVNLCETNRPSGIQPAKIDGHYVTNTYLPSPVHQCACCGTYNTMNNYSAPANLAKAYFDEQIKLAEDGDVNAQIVVKRRGLDASFMVPDVLLSNYAWKDITPGTWPHRSVNDYDYTFRCANCWHSLEVGIEEIHECASYTDRYHNLIDMRGNSILDQLITTGVGDIYSDLAAEDRTTLLQHDENIVKKYLRTISHRVIKVPTNLDPACHSNLRSHYPGYTQKLTSNMFAVKPELYSELCMAAAWLIDRNPDGNYRLDSTSIDLVDRSIMYTNRQEWMVKLKKTSPDFKSRPMVILGEKLRDINTVYELLMQQSIVYYFIIKRSSDALMDGTGATYTKSNITSIYVDGKTDPLTVNASTYELLETNQAIRVGANIILNNTLLDGIHVTIGSLSLDNRVTLTNRLSQIDDQTAVTIPVPDIMSIEGIMPIINWKHKTYSVKLDLFRTLCIRNMDGRATTTQLRQYAVAFSNTVYNVGETRITNRHITYDDIDFHVACCRAMMMHENQVADASMAYNKVLTCLGPLRALLPQLTNGLTGIILETLTRVVEIIMDKAGADIDTVLSTVKTVKFFNVNALENVWEKLKDTSINAQLSPLRVSNAEVTKTENFPNCVHHRALINCMHKGENNCKCCNLPHNNQSSLCDCCQPVKLTVDPNNYNMSQQDDNPGNKNLSKSSSSKPNSKSKQKQSKPKQNKPNTSTNQIESSADNSETKQTSTTPEKPLIKLTKEKLKLDVIDEEALMVATNVPKMFVDGLHNYPELTSKIQPARELQLYLPYMLAGETILKNKELKIVELINQKNDSINTCGYNALKSATDGNLVMDLDSFREVTGCNENFRTDDMFRYMRIKGENLIIAIGSEFHVSRHNKSDYYYCVIHSSATTKNDIDHYYHGKLQVIDKPNTVLTSNFEFSTSELEVVAQSLGLNFDSFVSISMPAADNLMLIALAQASRAEFDHETNTIGRLVSVGQDEYWQFPINNHVNNVQSGKIYKKIRKTNSAIRMLIDNYDQPSSQQITHKDSGIPERLEKAIDDYCNSLAHSIRYCKTMLYQQDKHKYLKSYCTVETRQTKNGVWISGADASLKTFDHCAIQYRSNKTTINKIAMVIGSRGDGKLFLSVDGQLPTKVRVAALKISSGSAIRTLIAMSGTLPDREELTELVRKSTGIVGVPGSGKTTTIINNVNEETLVVTMTRQARLTLSKSISGIKPNIKVISAEMLLNYPLSKFNKVIIDEATMLDYTYLIPIANGKIQRLEVYGDNGQIGFVDMSMDAGIRATTNLLTICQEYGNIEERNATYRLGDPAVSELKAIIPNFSSLSSSKTSWTWLNCANDAERIVWHIDNHQSDLILTPYQETKHQLEQLVLTSTRRTTRTITVNTTHSSQGLEVESVMVVLKATTGGQWGLNGDANYLASALTRATKQVIVLVIGRPSITNLSEATSKLGGSDCLLYTVIDEMEKGSSSKKLTELIQNHDISVESEKKDDDYHTTIKHKLGNIKLLITRQKVSIVSKPSFIPEVKIFDVLTNLTNQDTEIDTTNAPEKLIKYAKIDELQHKFELTETTAINKVRVLSWLVESTGTRELVIPLKHESLTITKTGGCCLWCGISVTYQGATVTVNGQYRTVIKRVCTADNKIGAIMLMNWFKNNDNCDIFGNLTTTKNFSINMYKERIKTLPYLFNNPDMHLDNFCDMLKDKDSQLMQMKFPILGNKSKFRNQHNFVIQQLNRKNWLKRNQFKLIIHYKSKTEKLVNLSGSDLTMLYNTTVLDMAANTEVTDKTYLFGQGTGIDGLNMTLEEHQIHNTVVARRINAIKSKLLSKKARSTTDILWLTIGDENLINKLKLEQPNLSINKFKSNNCKPALLHLIENYGTMLIGKDNQSTYIYAGYTINAPSQQNQHYAEYLSLTSDFFSSTMWSDTEQQLISDIKVFNEVNATTIQPITSWTQLQHNYQMQNNANRPVVNLGCKLPLIHPEKIAEMLSNNYSVYGIIPNPTANNGLFKVENSCLIFKDHNITMNCLNNYYYHATTGKPVRTDNLAFKLNILVHVLGFIIVKVEPIPVNSTVVAWINSELQEPARFKAKVPWLNVDVRSLLAGEPFLDIKELLVDKKFYRMLMMRLTAEDKTVKDAMAYARSLASVEVTNATYIGSTSQLNLSSVIDTCRLAIMHRTALLSQLSVITKLLNKASDVSIIRIMLKNMLTTALSLTDKLPGLLSAETINSIISNVIPQLNNNYLSELIIANDNLLIKLGHTSGKLVMYHPETEPHYPPESEAEIESYGYEEDDNESNLGEDDTTEDEMPEEVNSTKEDVSSHNDQTNNKANDELQNLTTTNDDYESNTKLERLWLKTGTTWSDSWLQKKFLNTLTDNVKSNKLMPTSITNIITGDEHQFIRQCEQIVMDWDNSESRYLIDPSSNQFRTRLTGKPQQVLLITLGSTGDVLPLITLANCLHQNGIPCTIMTHYDHFNLIPSEHGFWPITFSIKQQLDLVIKLFCPYSGKKINRKVTEAYYQLILASMFKNTFELDCRLVIAGAITPAAECFAAKYKCDIYWIRPYPWLDLPIVKLKWVRSIANASAQMLITIMGRKILEKYNVTPGEDTRLEMSKQLATFNLELLPEHMKKKYTNAIITGPLTAKSSYVGKADDLMELTINNSEEEWGLVSYGSVSSDNSVKIASNLAKAITKHNLNVVVNLSGSKHLLEFESFMGLTSDGVTKYNNKLVWLSTGFSYSRLLKKFQFIVNHCGAGVFNEAIDNAVPIFAGPIFGDQPVWIEAGSKLGIVHQGPNYFQLETYATTEQFISTGIAKLPSLKTNSIRAKALKSNIVQPSLTSVLGKIISIETNVKIDNVPYLKLSRTLELPVIKCCRQLNMETGEYICQFGKLTCLYNPTNTNTCVIDSMFAAIGDENLLTNVADGYNTHFIHKLALQYCFNLIIVSGKSIDEITNNKGSVGRGYIKFSNRPTLIVGRVMSSDVGHCCLLDGSVVDITTMDEYSTAGAIPDLELPVSKEIAFSFQSLLSEGYQGFNKDLQYKLLLNQLEKEWLTRYEILTGICVMTKHHNRLIVSEDKRVMRPQLCLLCGPTNMRFGWCCAEFINDQTIYSYGSFTERVNTEIIINLNVPIESKTKQKLAKIIHREETNKLYSLSRYDQSQLAQQHGITTDIIHEEAKGKVIVYNYENRSHHLHNSEELMITMVNQGKLLVQWGLDKSNPPDSPVEKTKNQPIDRLIMKNGKWYRYNEFTNNVLAAIESKLNNMKLYRTGALGEVNMQKIVLHKLYKTVESKSGAKMLDYTILPEKTLTIEPDGTLTAKLILSRNYNLLEDASSIDWSSITAKMLMLQQGTKYVVFDQKDVSIIITEDLHIYYHQFVKGGANEGSSSIDVITTAMGAQSKSNNKWFEISNDDNLNLTALEQDYNIDFMNNLQLTSIPACNAVTPRSANELTNQSTYIINSVNWCVNLTQGATELTDELTTDVIDLWELTDLSDQIIKYAPLTVGSLKSKEKPYKISKCRKHTMTQFPIRSRPVLTKLIYMEHNTITGRLMSIANIRKIIPNVRQTTRRLATTYFKPTWESACSEFQSSKITYSSNKTKQWIAKHHNASKVLKDLETFLVEGNQIRSIADINIHLKLESLLKDPAIQSFKQQQPRSIMWQHYYVAAIYSPIFMEVKKRLKFLLKEHIIYADGYKASDLSKVLSTIRAGKYYYESDLKKQDRQTDKPLLDVEMEIYRLLGVDDKVLNSWRTVHEKWRFKGTYSKGLCQEMRTTGQATTAIGNVITNMQANLPVIEKYGATIKLMMMLGDDNLMNMEVLVNTKEAEKNIAVTCNMQSIGIVRTKGGNFCSMVCHTRSDGTIGLGPDYVRLKNRFEVTNGVHETTETNLEMRSQSYLSMIGSTPEAIRIIKEKNWTIKPEQWYEQNTLIQATAKIYNTDENYVIDNYNKLMQMIDNQQIFEHEFTQYEASRKM

SEQ ID NO: 1335 - protein, 4869 aa, Capsicum frutescens endornavirus 1
MSHRLDEELEFVQFGPEECVPDLNKVDIRTIRNMMLLFDRGHCHVDIPLEEVGKFLQNSQLQSTELFYGGPSKKYYANCRPMLLPPSKVDGDKTEAAQLLLTGLIRKFGGSVINMLLLDCKNNYNMSPHIYKTGCSYGFKAMELPNVEAAMTCACCGIVNLVWLLDETDGLQLSRCGVCLQPLLVQKMLPDCIVWGMLEVVDITQLRVGALELNNAEVTLQLDGQPAFGPATLAKLIDQDLRNIRSVMSRAMSKTIYVPNGLTEHQKKELAAAVPAYKLLPMRGTPNPHAMLAAERRICAATMADKRKKGKTILDIGSRVNLNEVEDWHGMGPCLDWRDVERYYNRPLSNTMCDHTVKECNCLDNQEPLIISIDSLYDIDPSDILSLMQRTKSNQLFYCLSTAEVDFNNTNGKLAQGQGEWMRHDNKLITVLRGDDRPYVNDWKLSRLWSTADLVQIGQQEMSIQTVKILGNHIVRVLTLVPDGMDCLRTRQVGLQTISQIDITVPIIDVESWLNVLGPPKLAHKQMKLDLALYRALYSRNLTGGLSYEKLIEFGLGYAHAKYTTKTTTISHQHVTADDVRMHAMLACAATRRKFAWVSSAMKLNSTSNVFGLDPIEVTKLMTLDLAGTLIKDIWGAILPDGFIKQRLDELVIQVTKWINDSFWDTLDTLTSGSRVFTPTVYVWPQLGDEVACNAERICYHHKQWCNHPLSLDNLCDCCRLVTALPNQTKCECCMSESSRHECHHKCQGGHLVTPDPAALTCTCCKLQTLNDKCQCCSTLITKRPDKQQPVGAEIYGPEQKEMSKTIRSYKYEGLSNITSMPKAVNHAEHVGPHLTEPIEPQFEPAPTPTSIIKLWEEQLGRKFLSTPDTGAPSQLPDSDVQGNKDEAEAKQHSAPDIVGQLPTENEFQKTILELTGITDLSYVSNLRYGYTQSVTSQLAMPNEQNPDNRVGVSELKYFPMGLNQHDASLLAVVARQKVAGGGLCAYYALEHCMGVKLSLKHMQNTLGCKNQFSAHQIIKYGNMLGHNVAVLTNESVITGKVDPFSDKFLCIVHTLEDTSGAPHWEPCNVIQVNDLEATPCYMGLFKQSQVNKQLGLLPPNLNEEQEMRERCMIVLKLIKRAIPNLAQIQSGRVESTVYNVKGIDRFTNNKLKRHDPGKGLFDFEINKNCVELMQALSCETISTRLADELEAPLNINTMQNVEIDELKISLLRNAVLQLRMTWLQAMGALTRTDDHWLKISVLTHKTSKGTRMLALQDTKLKSGDIISVDTIDGAQDRIIWKLNDEFHCLDWLPPTIGTQSTILYVNKHSFKSGLIRAMILNRQHVDFHKFKTLVAESACTIGPAGSGKSTMIASNWQKGSIAVCKTSSAVRNLQTKINGPSNMIMSHEKYSYTPAPDHHLVLDECSMYTWYDLYFSLTKLPQTLTMYGDPHQISTIDTFLLGGERVLDNITDYVLHTHKLRSTYRYGATVCELLSPLLGELSSKAKHNTVVIDLNLGVWDDDELQKIMAEHKPDVVLTHHNITKHRLGRLAPGTKVETIHAFQSLESNNVMIVQYNEGGNSKIYMDKRYAISAITRAKLKVVWVSVGLTSGMKLIDKIRGTDLETLGGGKPKRSEEDDQALQQAINKTMSSGVSGESSGSMSPMQMARMRFSQNLATTHTHTKINKQPAKIAVVTKADIDALVDSYTMSRQPLLIYEGWKEFVNRWTNTIPTNTKIMHDHQSRTIRMQLYQCTATVVVDEQFEYYSLQVECPRWMPLIKEKIMSEYKKGLIEEWHKHALGKPIDTVVSLLRPCHRQWFLDYLPLSRTLDTEQPNPPAASTNLNRSESSTEIESNDEEWYDATSDELVDTDDLNPENMNLQELEYHNVITNRELSTKYPSIAELNYQQIKSLMQPNSPMLQPIKSSTLVVLVQSILPNTKLTTVVRTIEQGFEVAIDNHANTIGVIQVVSDGLVLKVVAGSMEHKIQTAIIEFKVKLYNRLVPYAGIWKCSANLNDQQIKIIKKWYPWLTPTNEDLQQYEDENLLELIKHGKLDVPGKLMDLIQTMRELKQVITEYESTSENVLEVICEVCGNECCSEFEELKLDHECLVTRMPLSASSTRTIRLCSEWAILMNDMDQCFKLEIHGNTITILSFGGCSLCSGLKFLCNDQEILRISPQRKLEFTRKVRLGINRYPEVLMAIMVSLHMPTELTTIDADESMVCVDLLEGVDTAVRMPAFELGMVLDRMRLAPAYLWATWKGQERGQSCSMYISENMKLREEWQEIAPALQIKAMSNLPGHRSLVNRPLGAKYRNIKLTVMKLNESVLCDNQLLASKYNWRYTPLAIMVEKYYWHKLNEWPWRLANLITLNGKLANIGLGYDGDLPINSLNLPLSYHETNNTAVNRFLVDKRGDAVLSTMKKTYHIVFVSKAQMQNYGPMLARDCEGMPIEEQGCETMDQGFDMLTEQICLKYFYNGLPWGEISQMVTDYPYLSILTSSWANMCTPTDTKYAFRYYQNITDCNNMLEKIEHSYGGGKVLNSATKETEPDNKQSILDCMKVQQQSKTGPWYTEDVASPPNLACKNVLMGLVQCRLSPDEMAEVMRMNNKTCVHLIMPKMIEQNNQLFGVASEDATHYKFWYHNSSHLTLVNKGLLAMFQTGQCVPTNHGTLVTHAANRVLGHCIVKILLLPNKSKLPKYVRPNLHDNQQKSVTFKLPEIKNFKQFVTTGKAISYKEVTMSLKLYRALSLRMLRPKTTLDDLLAYARTYSHTVAYTISSRSSQQPQFVTELMECCVCVFVESIKLNEAANRVMNLISGTEHPITHLHNLKHTAWYSLVKILADCYQWLGLDTTIDKILELSATVGKATIGQVIKNIDKLVVVRISKVDTVDPIICYQDSTGQYNMESSSFMNTKRKIDNMLQNLRESVHWGMQIERNRQDLTDGRQSGQLAPTATSKLADKLADNIGGDRDECIEQLLPIMLEAYEGDEITTAVMRVVKNVGRQLELRPKQTILTCINNDEYLSAAELSDKGKGCMEDCFTVDHLKAEVKELRWMYPDDCKTWEGKTILFSTIGSRGDIEPYIAWAQLIREVGSECKFLVPMDYVSYVNSYGFEAMGLQVNSKELIDTCISAECHKWNPLKLYQVWKRMFELIEGLFKFNQSKLMAFVANANMVIETPFTHIGVQIAQKLKIPCLFSTAYPWEQQAGMTTRADGMTITEIIAGVAAFAPFKKHIETWRREILQLHNERGIMVHGVGNPMVYLHPAQTKWWKTAKTSGCVGYASTVVESIKQTDIDLCAWAGSSMSLAVCFGSMTGTARISLTDQIIDKFISEFNIVVVDSEYQTNRPDDEVIVVNEANYNMLFSCVDVVVTHGGSGTVHNALRKECVVIVEPHFGDQLAWLKSIQSHNCGGRLSEILDMPLQEAMGRIDQWSVHAKQLGTTLRSEDFRVNLISNSALIWHKASEHTTKLLANIREPINELPINPNNVVSVLQGRKLKWSDWETEETLNISMLMQTSNKHQNIPQTKQAPDKDIQKAKGPTKTSRTSKNHKEKKYEFNYTISESEELAMKTSKHAPKQVTSVPADSTGNELALSNPVKQMLDQFVGVEVTRLSESVTFIQTGKAWTKDQLSAGHDTPITRTITSEPIIELPDETTQELIAPSRPKEPSTLVVQEVESCDANTKDGEVQPALQHTESTPIVIEMQDEQEQQSAANVSLTTTETITIKTLNSSVTTDYQESIQPIPYEYVSIATLRPTLIQNMFHLKSTQERGTPVEVISTVKVEIVHEPQGGYSCAREVLEKLLTIQYEIDEHQASSVLKKCYQWLQIITLPRLEDIKALITVLDLKAAIQLANNAIHYEHNGPEGNTGYVIQITGGTAVGHCRLLFVEFGETRELTMPKCTQMTISQSVQDELNAIIARLGCEQKWNEVNIPSLVVGEASEGDIWSKLDTTYTHAELIYKLEGSKLVHTADRMDRPMSRVTCRQSSSVLICDEVLTPDRWYWVTDGTGWRGAICTKIHGQIMLLTNSNYYKWKEHVVVLRTDIKIGLNPKVPQKVQLKKKIVTTGDSKVTALNRSTLYESQQHYYGVVITGIKEEGADLVAVYDYDNRPHHKYDDRDFLASMGPSKSVGLGFDLTGQLWDVLMNRDKALRHMLHKGQHKVAFEFSNQPQVKTLVKVLRNSKIKHIIEGTSVYVELSNLDEFKVSLLEEWAMYIEMKNGSAPHIDDVLTRYDQWVPLAEFIKQHCDNDNYKHVFGNVNIDNYKVKLSAGHRHLTTKISNIVKSEMDYEPPNLVHRNLCLTMNVMIDKRAGGLEEPAFWKFEHDFQHNNISRWWDNLIITKPKTKFDAGRFTQINTEAMIGNNPGTIRSDDWPTSTGVDGESTKMPYLSVKEWTNVEDNEAATAEIADYDIMSLWEDTDFSDWNEKFGPKNEVIVRSTNPTTNLRVTTKYTMVQYPIYSRPVLTKAANQEFNAVTGRLHNITTYRRQHYNVRAELNKFIKTYFDEGKIDTLRLFANDKLTYNDAKVLDWLRDRPDSNKVAEEVETILQEGMQLHSINRLNVHLKLESLLKAEPASSLKQVKARALLWQCKGYCAIFSHIFKEAKARLKQLLKPTIVYADGLRADELSARVRLTTNVRYLMENDLAQQDKQTDHDIIKFEMELYRLLGVHDDVINLWHNSHFHWKYKSRTVKGAGDAMRLTGQATTALGNAITNLLVHRKVVDKLGSSLRLFLVLGDDGLMFTSEKIDLSKLNNETKIKHNMMCKPHISETFGVFCCMMACIMQDGSCSLGPDIVRLRRRFECPNGVSEMTAENATARAMSYYMMLGATPEVVRDVVSQQLPIKPTKWYDVDSIRSAVADKYNMSDEQVLNEERQLLQMLRERNSFKHNILHWYEGV

SEQ ID NO: 1336 - protein, 5407 aa, Carteria obtusa associated endorna-like virus
MQNKITDNKGLKRAHQSGGRSESRKRGSRNERDSGKNCILTTHSNPLIIKRATIPYKIAGAPLCITRDRALALNREYIHADCVPTVSYEISYHDGPNDYIQPVYTNESHDDWGDNCHLQVNNLTVSALRSLQRDFIKVKKIGFQPYDGVGKVSDKEYVTEGMITSTPNENRLTTYKMLVRMLKYWNNLLTLLVKETLTNFVANGQDSNCGEKYCYCTACKKASYDPMPGVLPDIYCPWCDNDLRKRYCQLPNDVIAEQINDEYLYVLGNELENLAAVLHLDTSDIIANAEMRAKIVAHDLEKLKSQHGKSPIRTIRVRPGMNDEQNRRLREIFINYHMIYGHQPITSTAYTENEAECMLYKAVLAMQHSEDVGCINFNVGRYNPKLVENFKLGPAEHTIMINPTWDQLNNLQPMVKRFVLITRKPVPLTEDTMQLPLNQGEVLCINNRIHVTKPGLTEVEVYEKDLAEAMEKSTIDIGSETYFNIKVHVGEIYNLNVLVKSQFVQMDVPYVTTEDQTQEIEIPVFNDKAFLGLFGVPLITSSRCKVHSKLLKLLVTRNLSGELSFDALLQMGTAVANSRYSKSNYTISNYDITAKDIAHHAYIAKILNFRTQYKFMAIELLETAPKWQGLLMSIGNTIIKFVATQYTGTIAGTIDRFLRDWEIPAIQLQAYLEHECWDKLHEQYVHGKLKNFPETIKPISNFNEYDDEYHYTPLPEVTVIEFETDSQENKPGRTAHKQAEPFKATRNPESVITTQMQTLNADEAEIESYKSKLEKDRIDRLMKMQEADNDALSVEEQAAAAYRNYTEAQLASNPIDNDYITTATEPPEGEETVDDVIDENWVLANTQEDFANYFLTRKPSEKPVLQDQIYIPNASRGIVMRLLDSKCQGLDLKPEEHFVNVFNFREAKYAHDLTEGENNTCGLQVVNDVFNRRLTPTDIRNYGGTVPVSQATMMTVAEKLGENLLILDPEKITLCHYNMDSDYYYVTKLLIDTTLMARWKESKDKEKGTPPMGHWVIATGKLKLAFYVPTLVPMLDEGELMDEFKNKHNSIDQSDTDSIITRDHLATMVEIQKEQSHLGQTLDAARGFNVIPIQNVTTLVTPSLFRSNKGRPEKLDLNHHVPSGAIKYAKLLNANSSLEEIKELLLQSYNVPDTLPADPRDAMTNRYVECIKIVVRQWYHWSLPANYRSTISTHSTKLMRHGNYYNLTVPDSIKSGDIIYLKSSIGKHRMVVNTAKPGLVRIRMRAAEQSITVQMSTFRESASSALREMKAIGSHKHCWLHYLHLLQTAKTTLGVPGCGKTTTIVETSDADTTIVTKTRENRFNLVSLGTHGTVKSMEQAAIDKVRTKSLTVDECTMCDWMQLYYMITEDVKSMTLFGDTCQIGSIDMNPSPGVRYVKPVHEFTPQTEYLTKSYRIGYPLAETLKNVIKGFQGTQDHKTTVEVIDMEVMDLQEIRQLVELKHPDLVLCHYQETKRILKQILMNIQVETIHSFQGGQRNNVLVIQIGVRPVGIHLDSKYNISAATRAVNNLTWVSINTMPGHTLTAKILGGIFGGTIKSGLLKKFLIDNAFNNFMNSNLGEGEKFRLEEVTMDQNTKTYAIEVEKELIRITYDANTMEFVDAHIPEPLTNKTDLQRVKQAHEQNVTRFNRLAKDGISTFSGEKTIEVGKGTEEKLYKILFEPFDQGKYGIVTNFVVDTTIDAVTGTLTRYDAQFQIKTYVWSLSISPGSEAWVLTALIDESGLTAVYKNQFDEIHDALTNNFKTILGDDGNAVITRDPVRVRSSPSILKTLKVNFGFPWVKRYTLQEAKQTITKTEPAPNEDHEEEFYNASEQFGSPESVTVDPEAKRGTDPNNPFGLTNPEKLNQMILKARSNIITAIKAEKNVATTVTEDDYGNFYVTGSRMGVQVSVITNKCGELKDVELNKAAKMLTTKDKVITQFNVKKIQYEEMATLLHKTYNQIEIELENLQEKGGTHGKISIVKIHDINSIDSNKSRKYLIAKNNQNCVLFQIDKLIHMQVVTGMQQIDSLDCDESTKAQIKSAIAQTTVRKTNVVKKELWEIKPNIKNLGARWKGLIYEMLKCITEQQEILDQMIEATLQSMAFQTGSPDWKTFEGWIRNQVSLEATGLITRQLIIHTTMSKPSTTEVAIMQELKSIAQNYKQSVDKINVRAEELTEKLFSLSFEETNLHIKMTDEEARRKVLNDILKTNVKTLNIQNRYDCILIPSIDGQLYINFGNVGTAFVKHVDKIQTIVGNVPLVEDIGKMIHDTEGRYNLELGGAMKKQAKSRFDRDKLPLKPAKERITPEENADMMTDSLTQNYIVRSKPNNKNPFARQMTTREIKLSAWRKMQKLQDLLSTNQVQGHMKEKLEKIDNFARRHYKKGFENGYTKLRYILSKRRYEIYTWKTAEYEVICIDKSHNSASINFLQNGEVIIHDPEDILQVDNVIEQIRLIDWDSSEPYQYDLRTLDISLPGNLWLIGEFVVRMNAYSTEAIFLYKGTNVRMVNLHGCGPCIAIAFLSTYGSVYITSGYDRYFMRHIETLCDPGFERSLMNLIMKGKDPDIEFPIPLNNFPRMLEAGIDRVVNTTNYFVEILKDSLGLPHKPWEGLNMHHEQNIKEMEIKVQHLESKGLKPQHSKWSPINFCNIKSAPLYTVDYKYACILNAKLQPMLFKLDHMNDWMRLQYEVNEIIYTRWYSNFLKFAFGWVGARDGVIPAECIMSIDQHKRHNTVVYQKAMELANQVASQSFRMPISITISGQLDQENFLLLTEMLPTITVVRHEKLCRETMEEILLYIAIMNKNTFDSRNIKLDVVTTNPAFSIMNSFMQIRSLPPKNFEGLAHYDVMTHEARSAIAEYRHVLEGSRESWKVSKRETMEALVYELDKQLTGQQIWYGINLKQDKTRDLIHSYRCTTDLDVDGWDKTEKTMYILPIIDNNLFRIIAQDEKNLIISEAWSSRPIKVSKWLINLINNPIDIKNQIYVKTIQHLGAGMLYEMNPLIESIVVSPTLTNDQVMQTCLVPVINPNTLSWPVTGFFELKEVRMDTRLAGACARRMCLEDPTIHDLIAYARTELNSTYYGHVGIWSKHKETVDTAVNTAIAVYLKFKPIICNLRKTADFLTEGSKTLLGLVNHNMKEVLLSLATVAIKHVGLDIGTSEIFDEIAKLFTNGNEIQGKISEFFELARDMTMEIAPRKRKLMIYEPTEANVIMHDNYEKCHRRLQSTIAKVKSLSNECINNRLMTGIMRFKDTMDPHYDEEAAGPATNSGSIFVENANKQRLAQWVEWGKSLVEDAGHVPRRRQGKMTTATLDQPGSSKPEATKGTKEPGKPMTAKMQAKTIIRNQEDRGRQNALETEPNPRLKPAKLTVSELWERIPEIEEFNTVQTLPQTKTPKIEPEPEPSTNLTPPETEGGINQKLKPKTVRFEPEVKTITEEEAAKWLKEAGKDMAGNLTVEMDKESQVKKHKTTRSVEKEFLPTETVESLKHTMKVEAERSRTNQQDEQAGRAWLIPHEEALKNQPKEVATVGQLIFEQLERERESAVKVENEKRDQPEATEPVANARAIMLTPTNCILVASHLELMTKNWLVAIHEKFGLQIIKQYISSNDELENGKPNPRHLENLMSAMEKQFTSWYVNKKKHHEMDSSEEDMKALKYVVCSELDVKVIETAKRLGLEVITIRNHDIASGENYNNNWENWVNFNRERDVDQISFKRMIVHPMDPALSMGLAGEEVSKPQRPTVFGHDTMHTLEPHGHLSTIPGLMMGPLIDQEVSISKQSNYRFYATYKDYGFKETDVGMGDCKYALASLDQPGAIRSQLESQTLVTNKGQSVEVYRNGSPNKEGENSDNVDNTFTVSRMNWRLAEFEPEEITLAGKITTTNSLQEMWQQLVHDLPPGELKENQEIVTSEKPSRLSVTSVITLGTEGDFRIANQLVRELLTIGLDVTLILPSTMIPLIPGDYKFICYYADINGLTDFKNKRRQHTALNEMISGMEERVLNQIKQSDLIFTLEQAVFGKYLAAAYEKPFIVFGNVGPFKSDPIIYQKDPDVKTGFVTAMEERFMKAVIKARVNSRCGSKLAYLSEHAPIGKILYKFPWVQVQQGKSVLLEMADNVSKDEQRIEFVCQEYKNLITKLQSMTDRKVALIVLSTGVGNSDPEEKKAVIKTLIKEKFVIVIVDKNVISSDSGDCVQAYNAEILPFVTVCINHGGPGTVMTFVKAKIPQYIMPKEIDQHFWAEIIQKEGFGASSKKTAVEEFLKKMPKYKDNLRSLQILDNAEIATSNVTKLEHEVLCLHEDYTTEVVPYYNGVQNTIITEKYAQMEPSNASCTLKVTGLTTIYDPPTHGLCVQECILEAIQCKTEEATAILRNLVTSENNMMYEITKWPYLLGINMVIIVDGKANYFKANTNSSQCITLNISKVATHYHCTLCRRGQTTCENVRTYGKSKDLYSDKAIINNRLEIQNTLTRSAESLSTKQEINIAMMKTLIKTGKIKKPCLDKEMLETNMQTALAKVNIHHTIQRQPNRMLKVKIMTFETYYEVKERLITGKLYCLFGVNGNNQLCVAMLDLEGKQILMPGEDSIEPSGWIMAVGYNLKTATRKKIVRSATYQAINAMTSKYCADQSLCQCSPETNAEQLVIATFDNRWHHKYDERATVKKFDYENVYFVPRQIGHTMLEAIKRSFPRISYEYGMTRLHIDMTPEYLSKWFIKGELQLGELTMTRTKFGYMSEGVTDSEGDQKILRAATEMQQYFILNGNEYEYKFDSTPPNQISIIGTNGEKIDLEVTTMEISWKINLGKLEKEITMINKQYVSKTGPRVFVTKMVGGADMWFNAEGEPDRTAFHIGQFRKALIDQIGFRDDLISRPQVDRVLGTKLNNSYAILSSQASSSDQWDSSGKTTEPGPVEKFHGRIEPSINDITHAETGGNDDLAWENMIFWVDREYINAVKFAPTQPTMIKAKETAMRLMTTWKTTTTEFPQRTRPVFNKMVNAEFNAITGRLGSSVKMRTVQMEPKHEITKLADTYFQPGWETKTTEMRKHMLNIDPKAMREWLVGRPGQLTVANDIIKILDEGMSIHPINEVKIHSKLESLLKSTAIFTLGYQQARAIVWQRKGIAMLFSHMFKQLKDRLKSLLKPEVVYADGLTPSELGRRVRLVRGCQSVIEDDLAQQDRQTDHQLLDCEMELYKLMGANPLTIDLWRTCHNHWRYRATYYSGSFDAMRLTGQATTALGNVITNMICHRELIENNITSMLLVLMLGDDNLMMTKEHVNTEGFEERMKIRCNMQCSIQQSKEVGVFLQMLVYATTSGWDVCPNYVRLKNRYEVTSGVSEATMDVMNSRRMAYCCMLGGNDRVDAIWKNCGGSGKVPKWYNQQQAMIATAQRNKCTIEESLRNYNRLLTMMESKMQFEYEFKHWTWSKFR

SEQ ID NO: 1337 - protein, 5838 aa, Ceratobasidium endornavirus 1
MSVSGDDKIITTTVKSTIKDSDGKREYTTNVSKTVKVDGYARYEGVRTQKDHVLSNKERKQYKHMVLHLQSQAIKTASKNKRYADVGVGKNKETHVYHLNVSARVAMRALALVMHTDKAIGTDNLIRSLNDAFEDANAGDQSALAELAFKYQNWTNQSLATRESIASHYNKVNIKAPKSSGRFNMQNARRPKKNKRSSNVHVAAVTNTIIGNRYTHHNASMIGVVSELTKCGFIDFATRAYQYNVLSVATYQMSSMIHEQVAAPCTQTDHAHLERKPKIKKATPTNIKRTHKEVHPIKSDQAYIDHVKKQRATQACRASRILAASGNFKNATTQTITLLKEARAVYHNSNLMHKIRVARRSPKKGTSNNTRTLPYETLPRSRKSQYCLLRMTGYTKTRNPHDAQVASGKVHVRIGSRKNDPINHISYEPFLGSLEADYDWVTNSIICEGKIWYNYKFYSSDVTITKFTSLQSNIMVQDNVPLTMIPAAIAPTELEIEQGIDPTSDAALNHPLNGFANEHIGYQALPIAYTAPPPKLNGTQIEAYNTYQHEHNAKTIGSAHDRQAIDFAASLCNDTPSLLSSFNSTVQNIKLMSSFQGNQVTVTSEPHATNISIVNTENFNRFTGRSATKKSNKIAPSVYACMINSLIHGNHILDVVNGDVVEVNKRTPNTIRNIVKHITSMGAPTFLEYASQYEDANTCPNEANNMKCLGDRCHHGKGRWPHIKYDDNNGFKFQCLPGMTYNYRALPRYNAQIANRDIHPGGDDVLDLVLDPSSWWTCANCNGTVLYWGTTYDDHTFYQATRNEVLANTFCPHCHNRVFVKNSEVNPNLDGNVHAPFRGLVNPLHWIEEIYPGYTLSASSTAAPMIDDHDARLLRRLLSVGKPKVIYLPTEVSEINDIQSSFRTVSLVPRPGALHAFGGRATAELYAMVGTAMANLESTPHIVTVNVPISPSFEQMTHSHNCPAIVCLTNLHAKDGLVTAAINKAPVIYVITPSYEGELPKRQLGEFYLYAAANSDQPYVIAKGDSHGIETRNVISISGHYYINSTIKKGHYFLMNAFVRYDGNIKSLRVVDTDDNAVESFNIPVLEKHSIGNLLGYGWVTKEVKIHRRLLSVLVRRDLRGGDLSYDSMMEAAIGLAMNRYNLADRTVKLINVDAETLADHVMIATLMMRRFIDKHEQLVGLIRNDPSWRNISEQVVHAGANALIGTFLQRGNALEQYANQLTRFHDSAIISKVDAVLTDIRNWTDVIVMHDTKHHDMTFTPDFEIPTCNHLIGPVPQNATDWCKCCLNNSHTPTCSYCMPGQINITADLDDAEYAYLNEEAKAEMRKPYIKDMQKPKPGRTPLDEPPKPNKETASKAIPGTEREKTFGIRGLSASYHGHICYSCKQPYAHKARKSVGKTEVFKIGEEHFQYMGDCPWHEDGQYSIKLIESTPGIYMPITDMLDQGKDNKDDQMELVQLTSFEWADTLAKGTGTMWPTVLQATPLLKGTIKMGDVFKMSAEITYPFDINTCGRDAIRTLWPHLTIDKIAICVGKHDSYTQTDIESIAKELALDIVVNVENEYTFMHYGSGKKIGLLRLSSSTGIPHWHAHTCELVKTPDCHMSMLPDCTPAMLEAAHATLHKEKWSMNAPNTKRVITEIRLLKSSLAGKSTVTRPVYSEHEGGAFITNNTSGMHNLQAGLVHLAVPRDLRHIMPYINSTSRETMNVDALAASADIVDQIEGIYDERIKRVREQVKNIVDVFTTMQSSLVPSDMVTTVKNFTIVSPDKIRLTLPETYRWKALDVIYIRSGTGFTPVCINPYSVGAVYYCDLNMSAPVAGAMTIKYRSRISVSSAFRSLAGLMKVPPTMEEIKSTLNRSRGVLAPGGWGKTTEIVRNMDKDSLVICSTSTAQEVIKNGLLKGMIVGDERIDPKPELVEYVYSLEKAQYLDLPDKAKIIVDEAGMIRPYQLLTMIRPLSTYTFYGDDTQVGYIDFTNLGGQAATKSIFDYLPKHMITVHNTQYRVSHPLCAEIDKVRNGGYIYAGEYIETTDRDGNTISEPTRTTTFDMTDYSDWSDLAISNLIAVGKYDKILVFHNDDIRAVEQACRKAKLSVYPGMVNTVHRAQGGTWKRGLVLQHKYHSGFGVEVSPRHCMTAATRFLNHLSWVTIGIENYKGKDLPTRMGKLSAQTPGHGYISSGVRGIKRAFKSFKESDIYGDNLDQLLDVAKTNVEWRPKIAHSVNGYRNWSLYNAMIKKYESMYPCRVSITQSSGYDVITIKALGLKGVVHVFPEHVQIISDMAGQLTQTKITDAIQECSETSSTNSYVSFDGLVPNHVKTKHFMHLTTKTEFRLMHSATVAMQVAGSTFRVDVGGCTYLLATTTVREPLNLVFYNSECEYWVTNVTSEPTVVVSEDVTMDDSFVNWLNGGSYAYDIDHHEINALKWFRNWWQERYLEGKKIANMIKPIFDVDGPFVAENSLYSTDIQKSTYNDLSTDTDVTFNDSMMAVIDMLGMPLPSLTNGAKTVTMLVKNNKVFTVPIAASSVSLCNLIVYNHISYLKLSWTGMLLRNTAWAGLRPLQGKFMLDLSKHVAAGDRTGSILINAFGRELLTAVRHEPKSLVLYRLEDDKVGVNFRKEHQSQQVAYNVTTIPKQWSQINVNRAVMHSLQTCVPSLDVFDSDASGAIQMSIWHWRSHLTNTTCGNPEIMKLLEPNMWKALDGACNMMSTSEVKNVKEEAVKEAMDRTKALAKEAVTSKLMSSDGLITMQKRAESICYYPPYCLNQQPESVHETIVGNSIITFLPIPAASNWRDNGDGTTTIYDSQHHCTYNVPSWLTQLWHDKLMNVKTNEVTITTIGTSVGQLILHIHIRLPGDELRMVLQDGISDHLVTIQVPIINNNFMEDLTKGHMQVTKIKVRESLWRRITMRLLRPDTTLADLRTAIRMLLNNTEYMVTHQRAVETGLDSDQGALIALAAYCIYHQKLNTNRDYVIGLVENTETYLMRSLNHAKRTALGLIGTLLKIMGADKEPAAMAKILGDVLKQDTSMNPIFDVINNWDNLTPKHHVETIPIKMIGGKTLTTVVDRSRGFQHSGLSNLMFNYLRYGPTLYKRSKGDTHYPIAEGRPMAATPAQNAQLASNIGGNFSNTLLDQINARNYSELRDNLRGNVYSTQQMVYLEWLIRDLTLSEKRILKLLNDYKSTKISDNVIIMVNKLNTILQLSYNSGIGADSNWIRDLEWLTTKFSPSSPSSEAIYQRNHALIEQCSKTVNGATLLDDLSMYAAVSALMSLAKLTGQTPKTAKIWNNLSGMRVGLVSVGSYGDMLPFMNMAGVLAEQGALVTMHCPAEAENQFRRAGFLTKTGQWSLKDNLDLWDELTRAKLDVDKISKSLGTNWIQGLDLQDDQDLWISSPIAPQGIAAAICFSRPHFYLSPLPWQLQHGTPKTNVFSTLSDTGIIMMHSDHINNFMLSRKANKTVKDVLLAKQVMMYTIDTRLTTMISAYYQPISCGYLGWTNPINNKPIAKTGTLVSFGSMTQGKGLRLASLAIRALISTGHKVIHYSNEKYMTDEIKALVALKSVKMVKWTGDYYNNLGKGWTVVHHGGAGTTQSICYAGAKQLIMPVAYDQSYWASQIDGIYGLACYSEDPNEIEAKLIRLASTTFNKLDVTVDEINTNVETALSKAFEAIMPSVQILPVKYFHSDDNKSNDAILHKVGLPKIKTMPLLPERGTLTPGYYIGKNTQTLNVMFDPYAPGRRTDTCGYDVIAWASNNNMAEFEKAAKELGVKGDVYTENFPTLGCMVKANVCVITNNDIQYTVSDQRWPTIFVRAQSGHAVIVSPVPLVDVRFVDPLKADITGFAAAEHGEPCENGPNIKIDAGHEHKHMHTTNESLIRTMQVLLTMGRSAAIDNRAVANTVLEANAAAKVLEGVKRGIRGNDWASLARGNGMLPAYGLSRISSTSVDGVYDITGENVKPPQGMVLLHRRNGTIHANTVIEGQIEGENYTLLISTDTTPPNLVFNVRARLFVRQSDYKWSASDTAGYALRHDVQLVNALLSTATITTVPNDARVGTLYLYNVHNRWHHGEGEGRHPLNKVSMPVNSMVIVPGEKYDHDFIISLRTPQIVSPSLIKGIKGYTLDWFQQSSTRPYLDGYDPSLWHDFPVSYDDDVYQRIFMKTPAISFESRAFKTIKSWANNWAAQVTGEGFPLKPSAFDVINNINSFASDRKGYVKYIDTLVPMVSAESATTMSNVKHYHAMPSVQYMEQVTRAVYFKALKSGSHTFKVEVFDDTTGEYIESTLEQSIITLIERDDQTVDVKFRNDALLELIRSQLTGLQRPQWSYARVAGNPSVIKALRSGVSKYGRRGLTTINIGIGVPITTEAVEFGALTKMIRSAVLDLAQTDAANSSYDDLDYDADPAEYEPHMPAVDANKFSISDAIIYASAMSHFENHGWKETIDKYIDDLVSSALEIDMSRPEQKFTISVGNDPSYDVFVSMDGSVGQNCTIYFECDTNDEEVANSLYDKSMLLVRAYIVSEIGTGSIKSPRGLLRSIFYCGVNDSVPWLSDDEMCPGLDAELSTYILNKHMSMSPPIRSEVDAIQSEYKVLEVVDTDTMLISTEVMMSFNIKANIYIGETKNNDYNLDIRYDNSGKKETRTLTMSIDELLDILSSSTQIQCPNGVNFKLRLEDEMDLSLLRELLPEEANTLLVDDDVTSMMVAHFITSDKNSDGAELRGFEISDKSVHHDRTFTANDWPEEGRSNGLPYPEETNEFRNSDVDNMHGLNLTKVMARVNPNPIQPAHITAVMLASGILNIVNGYTRVSSNCAVHDKLTLEFLPMADTSKFNWIKPPTIFGKQRELDMWCLVPLTLNFSTPIHLYDGSSRIIPTPPSSFNKSISFTCPDVGYPMYLGNTVFNGVQLSRNNLLRAMNAGADIYGMADYFIMQQYMFAERVEKVTVLGNWPENARVVECKNCVVKVRAPPHAVASAPHVAIASNTGKKPGYALPTTRPWSTIDSDNYVLHAAFSVLTIRGVVVPRSNKLPLEDMSERLWFKRSGFLGAETNALGDLLGIEISKLTWRELIGRYTNGKLSCVSQQYVIESLDKIDEIITPSADGQVLLIPKIQGMVTMGFRGVLEDKLTSFGLPYMAEDGEPVDAIPPAKDVRTMGTTGMQISFENQPKKTMFAIGVPVAGWKTTLAQELPQIFADHDDYLDQEKHRKLFLDGNLDLLHAFQKQALVPKNKVLLTWGSENVPSSRVYLGSVMHHKSARELNLPVPEYRLELNEINRIGLFNENNYTLVNSYDEFKQKCLGLVEDALEGNLTVRENTIELGDLADITFSDIAIDGSYGEFSSKDIYLPYIPCLSHDVVQDIEPPEQEMTPLDFINLYEDNDLTDLVRVVAPMSEPFRKPVRSTEHAIRIIETAKTVMKKYPMRTRPVLTKLIYGELNASILRMESKEVLKKIQCDPEYEADRMAQLFFIKQKKFETISYNTAATLEWVKQHKGSEQLQKELRELLDQGFLEVPLNSVKVHQKLEALIKGFPKKAIGQLREQQVRIIVSMAIAVAAIFSPVFIKAKKNLKKLLRQDVLYADGLTPQELSAYVRNIEYDDDLVFVEDDGNKQDKRTEHDMLLTEMIVYKKYLGVAEHVVDLWYQAHNAWRYKGTWVRGVSDAMRQTGQATTAIGNVIVNLVVHTRLVESIGNDFVAMLVLGDDNLIISKSFIDPRAHEKDSRLRWNMVQECEQFTTHGTFLQMIVGKDGNGRLQASPDFIRLRNRFEVTNGVSNDPEATFEARCLSYCMMLGQNERGEKIIRKMGYDTKLTTYYNQVAAIENVAARHGVNRELVKNEINDLYTMMESGTMQTKTWTHFTGTSRF

SEQ ID NO: 1338 - protein, 6188 aa, Ceratobasidium endornavirus 2
MNKLNTNNQSTHTSPQRQNPFPDAVVSTNIGERIIKEVTKLRYQSQHWTDDEADVYRVKGIRKIDGKVETVWPRNHAREASVSDYLEESYQQGVIDKPYDGSKRESYIKKITEADKVTPGTHIHGRHLSQAYTSIKVKRTQHEDGLPIQFINEKVPPAVKYVEITGDGDCWKDLYDYCPKSLITGVGPDSRIFKDAGYLDACAYIDDDGEKVTNTYSGVQGLNSPRYLQDVVADLIEYGEFWDDECEDKQTFKSVHNQQRLHLILELNENDTMHLVDFGFDDESLNDDPDAYTLRELDLILFTPYYIDYEGFEKFEKKMQTWKPFFSIDVRGMAVGVHGDYLLRNNFLDNLEIEVDDENSQKYINAITDHDNRVINNTWARTQFKFLNTVRPDRKLTETATKQMEDMLIVKASDSLEDPTYRYLMDVCSAYAYLNTDYSQTHYDTVISSYLRRQEWWKEQVESNKIQPVLCSVDPSWDEMLDHDLTYIICPVVGSDLSGDLPCGVGSYKKEVDGSVLFAFGTSTVGYKIRDCTTFAEGNNIKTVNGKTIKVVSRKTFDAMQIIVVTPLTFHQMEIHEAEERVFDVPVLINHALWVTNMPLYKTVRVRVNKTLLKRLINKNLNGNVSDDLLMEYGMALSWYSYNKRGVEVSNYKIDPLDVKTHVYLSKCLIRRSNLKDEIQAKLTSPGSTATLLAAAAAMFETINEKFDLANNKFVDLLLQIIEKFKVPVVKSNAGVAVKAWDSIDTWTLSEHLTLSHSGLDAACRHHIICERPYTGYMCIDCLAYTAEEDSDLCLCCDKGDCQHDLTNQVSGQEKCHCCKNDTETNPCNSCSLEKAEEPENIDFECHGLACYPSRPKNTIALDGEYHEHTCINCESTYVHAHPYRNLQHHQTKAECPYCGVKKISTGMSFIAWTSHQNKNNNYKDRVVKGDKPKPGKSDKNARKGGKPMSQALQEENAYIENVYGAPTEASPKGENQEDSGAVDVENVTVEATGQENQMPVEEPVQRLQQIAVMKNIKAEELESRAAPFELPYTEAELIRALPVNAVSNLYGSSEMFELVSTSDSKLSTIPFVALEPPVEPTLNFSTSEVTDLKGGDCGLQCLRHYVGADFSEAHVKTVTGKTRGLTAKHLIDVLAYYDLNAAIIEPTGVTFNRVNDSESFAVVSDVAALADIEADHWVVCRMTRISDARNELWCHPLSTPAQHNVSARIRFGRDYRKLTHHEKLMVGFSLSAKTKFSLKVKLDTPKYEGGFITNSNKTDFKRGQIHIQVPVNLEYLCEAMQRSVDSGELDDDLKTVWDVIGNEELDVEYNLRNAFKECCLVLAKTFIDPASMCRFKKLPIIKEGNKHFVDLSTTKLKGSDVFMYLTNSGFSSATMSSSFKKVAVTVSGNVSTVQGYIPKASIGSIYRRMQAIINTQVTSESLHKLLSQAQIVIGVGGAGKSTSIKQWRESHPNVKARFVACTSGGTKSLREKLPANDMVDSFEAASITQSDAEMVFLDEATLIKPWELSLIITPSTQKLTLLGDPTQIEALDMYKSGGARVVKNCIEVARDLGAEFEERWASYRYGEPLRAELAKVPALHKLTTNATHTTEFEVYWMSEFHADELVRMFTGCEVVIAFYQDHVEYLKRIVTKSRIILAESVHSYQGLDAKVVGVLQAPKGNADVHLQSGHTISAATRAKEKLIWVSVSCFSASVDLHARIGAEVGASFFNADEVIEMLAFKDNAKMLDVEALTDMSFMQVVDKVTTGESPENYSIENFSIETFAKLMSHFTDKLQVTNHTTNENKDEVTFAAKYGPLKGLVNVHKNGTVKGAVPSKYHAQLHSAMAWSCLFGSTTPMPNLCELNSKGKSRIRIIAHVSKVYAANNKELKLKNDLKGFMVTTGARSCAACSEVVFTRNGKSTVVNKDYFTQNRRHVYGAESELIVECLNNSNVWNILPDYLDDDNLSLAILTERFQTAFTEWKSAKLIDQNALHYNKYENEWIATEMKTKYGVHVETSNHDNMYWYPILFRKGLHWHAVDCSMEERKVVKLTMRKPKLKQLIYKNLIGMLEHYRRKSLVTIVAKQYVKLVGARANADKLPGMTQTIAWHRTHKTKVYKNIANRVAELKISSLKFEKQNILAPTNVHKIIEENTEWTHVLSSNRLAVGDAASQAGDLILVELAKLDSLGSKNFDTYLSTPYANYVCNTSNKNHDFQDPMISMQTSWNLMGSLYDDMLKNHMSRLPSTSDTYNQLQNELQTRSAFHGQDLNSTTVLCSPGITSSKKQMEFILKDRETIITWIPMERRVIGNNIIYLNSNSSRAYPVTAEFDEALNKGAVIKTKAGILKVHTLRMIGEYRIIRIDKSHNEIWASPWTQDNRYVWLEGPALILDPEQAIKDGQILKRVKQKYNLAFLSNLRRRLLRRGTDMEDLKVQTRTLVNTAQFSLTNVYDKYDIHVHEAKRCAEMAMIIHNTENKMFGLLEGNSWQDDLKLAGVKLVSDILTSVVPNNVVSELLGKLPIDNHKNLMTLIIKFFEKLENLRGTLMNEEKLFVVPGQYVDVGTINFVNKLKQRLTAKAKERPVKPYLFIRSCDVCDVSPMREAFEYCGMEMLHLGPKEIVPKRGIVFKTANCKHDNEPYCLIWEEVHASMFLYPETSGNCPIITNTSLHVEGESLQAYPNVTLYTDCVVTVRSWNYMIACSVVISENTLFKLDDLATEELRQLTQGRSEVGGVLLLLPADSTVLVEDSGKRIVSSTRRDFSFRNLNDLNEIIMENLDVMNSLHGRTKMQIGKKNVSLPQAVVDVGAIDSKISHLRPNLAKMLNIIMPSSTGKGMVAEILALSKPKLSVLDYSTIYRRDDHRQSMINLFTIAKGKKHDVVLASNRPKGDKFVALLYKYMPRKYSQKGGKFTHKTWDKYIKDWKKTETAGRFIYWEDVASLTQILVDLLGVEVEMEAAVTDCSHIVIKPVGVEMRTGDKCCECKSDLSEMNYQVKSKTTLDKLERYRLKSPWVQIGTLNKDKTIESLKLEAHQKLSSAYQIKSESARAGIENKDVDFKKRKNATWRDAASLKAANKSKRMLFTLDEEGEPHDSDTEDKEEQLVNTSYASSLKHKVETIGIFNAKSYASNPRKPNCNELGIVTGKFIECVFPYVLPLDPVTVNKALPNYVMWAMKSLIGIMASTWYVPITKGLVIDQIELDGLQFIDTISNDYQTGRIFAKSAKGRGVIKRKVLTPGCQVDRYPTIGEVMPRITFIPSKATEVTKYDHVILWCPECKQVNSWYVMPVVTVCANKHPMKLICHPLGQKRAFEMLEFARFTPYDTLYTMGPLETEIRKFTNNYWWSDTFDDDEHYDSDGDEDDDDDELDKQLYKKTLDDILKKKKESGKTGSDKNGKDESNNADQSGSGPSEQKAALHPAVAVLKSEIESKERTAPEVSQGEDAERKEQLERMRIETEQRRLNNMLSKQPKAQNLKELDLLKEMRQEERAIEEKALKEPKQKTKDEIRRIVNTLQVIGTAFKELNDEDDPYEEEIDITSLMRKEEYKHCGSEEMLRVGNHLHQPQWKKYSIGKTPATFGALLRWLAFERPWGTPLSNAKCNHYSWLNEKLNRMKSVMEERWFWNDNIEISLLNVGPIRGDGWEITTQQVFISRPQSEQVMLSTLLMAHSAKYNDNIFASVPGNFVSIQPEAISFDCCIHADIAALSTDVDEFSRSGLRVQWTRKERSAQWKENALICPDSQMGRPLVIVTGLTPDSKWVFGWCSNAWDIMRPFMCYASHNVLQPTEAFPMHTYVTPVHSRRFRRHLVTWPGAEDEFLNLRISPLANAPINLYPVGQGSYFKSGPRYDKVLYTISELTYTPDWGKKNKYCQHQAENKFGDVLAYNEINFCEVCDVIPVIMMRKNKNLAIPKDVGNLVARILMGQTTFDDNEQDWIINTLGIDKHVLHKNGDLPNGIVVSSKENFLRWEKLPTDEKDEDEPVWVELKFEDGKMVDVDRALGGSAEEIRPVYDWTDVQPEPRGWFIPELLFEWEPVEAIEMWNSMMVGAYMSVNDLNALAAETMIDFYDHIMPLERPIPLSDGGDRDTCDEVCVKNHAHSLFCMMANESSIEKEYVDWVDANGGAGNKIVTDLIYKKGAEMGLHMSNTPTKVGMQSGAAGTIEIASVIKSRISSAMVDLDRFERNNYYGEGLEFLAGELARDRSYDALRQKSPLRFILGHLHPVNLNKELIMTAMAHKNWNEEQVMAWITDSEEVRVKSDVSEFYALIGYDMDNRNSRDRRAIGKSWPLKTTNPARRIKERKLFGCAVKKLKTKNIMTAVKNTDTVAVNEVTADKGATIETTDEEQWFDTTTVQDVKEEMATQETGTDADEHLDPKLMSERIKAEDKKNNKIANAQELDQEELTANEKHFIECMEGLENNPEFERTGNVWLENHICGNYERPIRIHNNPLFSDRYKQGRDLTSSYTHMVDVAYTRPVKLAKQVVKALDALQYALQKLYIENQSTVALHVYALHTGVAERSPADCDGMHLAYTTETEKFEALGFKTIKLAKNPGRLGAVLRNLTMALWPGQGWVISHGGRVTYHSLYCEKYLKHLNLTHRYQSGGAEGDLGNNLGISVWRTFSPYMDCFARSTPNSYLKSASWLIAYSSIYGIDEANMKEFDGEHYICFDSPYNYSNLGPMNKIYQTVTRRMNIENIPAKFAGSEDFDRSMVIESGRDMVNYLPLAWQMDDNSIKKNTRSSRKPKPSKEITAEMDRLRVLKFGALGALSSPKALTPIEQMRKEAQERQQELQKFVIDTVKITKDVSSASLSVEDCLTAITKLVLLEDQGSLESAVGIDFLPGDKARLFTMYKNKPLFLIESEANLQDWNVVAKMYNERKLLKESPAAKALWNRTDIGKSLMIVDKPKLELGTAPKITEEEKSALVKSAKRSTKLVHQSDVKQTVKIRRVTGSNKTEWIVNMTKNTVTAGNEAASEITRAEIDIALANEMLRQIYAGLVSAGSEELMLNHHYFVKTQAGILAITHNIWQTYGSGMFVSKALDYSRVVENLHSVWTRKETIKHQEQWKDMEWQSLRDKFYEFSSNNNSYETQGTIGLLTENIEQGIKVEYNKSEIMERIWFNAESTLVSKITLKDFETKVVYDPNTTANCAMMCLKYFLRMHVGRDVANDLVSILHLSFYERVERLSEALTSINLPHVIIQPTGVATGIINEINKSIPMLLLEVVQLLEGISHVRVVEVKGKLDYNVRKMNSVKLSSEIMSEFAEYAEMSGKLSDCIQHDTDFTDAYGDLETTISKAALENMRIRWRGKPKSGLQRNDKLVSLQIRTVHGTDYKSIQGCKNGDVYIVYTRKGKQPLVTVSKEKGTTFLTKMDVGDINGALLLGNIITKTGTKKTITDTKNRQIGFLNQSDKLAAASRFGSLATNPVRADLQKIAFTNFSNRNHHTKAERNIILEKGIDNVLVLDKNLRRMAPEEWQMIECSGWVRAVFVNSELTIQKVSSYDVDVSEVSQLFHASRFEDRLKLLKEFEDCPWVVVGNDLLPEALPEQIKNLDDKEVKGSVLATILKSASYDVELKDDSTYHVKVTKKILDGPRPMKKQVSNKFVRDPRFAAEITFDKKNYGYMDYALKENDSVRVDEKLLDNLNTLDEMSKPKSHDKLPVLDDQVVSNIHSVVSLNNLVFTDESDSYLSLKTEDQHEVVLYGLATTTDPINGEVYKLPTDPRTMNQWDDETAMVDGRIELPYDNIKLQHREEFDGVKKVLKSVLAEYPSHSQPAHTKRYLAGLQAVSDLFGKKLVLRQVEHDPVEDARLFADTYFRAGSTAALPNIGLDPNKILNWLAERPDYIKISQDMMDMLTNGLDIRGLDKVNVHMKLESRLKDALIGSNSAFEKYISDNKMPETIEEQRTRLIVWQRKGIAAIFSPFFKDLKDALKRVLRNDCVYVDGLTPQQICATLGNIDGDDVVFAEDDLKKQDRQTDHTLIDTEMEVYKLLGGNASIIRLWRNVHNHWRARGVGVKFVGDASRHTGQATTALGNVIVNLMVKCRIVRELGNRLKMMMVLGDDNIIITKPPITEEMISQQSARHFNMQSEPSVDPISGGFLRMVVYKSNHGKLECGPDVIRLRRRFEVLNGVSEANDENVTMRAMSYCMMLGDLKPVRELIEKEKWPINPSRWYDFQALVNATAYKYKCTAEHVEGEFNALMEMLKERKVTNVEKLMFVGRGN

SEQ ID NO: 1339 - protein, 4968 aa, Ceratobasidium endornavirus A
MDEGEWETKPENFSYANILQCTADNGTKWKPAPLKKLIDVVKRYNVCTLVEATGEEDDYGEPIMIPTTKWFSKPENAKNLLIRISVVNKELLHLEECFYTEDESEWQAATNAGWTNLQELHEELRKLDVKPTTPEIPAVMSEPAPQQAKPDDAQLLRQLQSCASEVYTSISMDRYLSQNQVTVAAALVGAPNSLLNNKFFQDLDFATDGAHGVEYLNRITNHDTRVVNNTFARMKFTHIKTCRPSTEYDMNAVSDINNLIIATDMESLLDPNMTFLLDIAACYCYLNINPDKTYITDEVKLILGKQAWYDAPVPDERLCLLTLEPTFGECLDHDLTYVITPTIGIDNDGRLPNNLGYYRRVDDYVLVSFGSSSHVLRVGWWKGLAAGENRYERDGRGVTVVHRKELGGMTVLCITPLVYDRIMVTEAEERTFEVPMLEAGCLSRIGIPLVRSVNVSLNKTLLKRLINKNLTGNVGTDALMEYGMALSWYSYNKRGVELSNTKIDPSTVKTHVYIANVLVRRQKLHFAIEDYAMTRGVNSAILTALCAMAENLIGRLNLANSVWMEAINSIVDNLALPNIRSSAGTKILNWDSIDAWTLRREMVQTSSGLRSLCSHHTHCPTAHTGFLCICCLANTALEGTSKCPCCDHSMGCVHRGNRTTEGKGKCSCCGDPTNDEYCTRCTPSAAYLDSLTSEKAVTGSTTNGLKVATLDDGNEVIDVYPTDTLDLGGGMHRHTCVVCKRPYQHKHNFHKLNHRQYLRECPHCNESTPKPEDVAKGQPTSNRKMSTTRQTNKLVDTHPQGQEATGPKQTATIKSATENMTLAELCQVLPMNAVHILRNEIKHGELVSTSPGKLSTITFINVPSAGEPSELFEVFDVTELAGGDCGLEIMRSYVGNNLSTNTTKSLTTRSYGFTITDLHAVLNYYGLNAAVVNESMVTFSRVNDTEEFACIVTGSSIEESTFKEHYLACKVRRVKPGNNKLCAAAMSTVVAHDNMSLTMYGKRMESCTLTEKLNVAYVLAIKTEVQMKEKIALPSLEGDILCNGRIHDLAKGQYRFKIPQEMLPFVASFIDSITTRDVNDNLLQIWDVDETNICDVEHNCKHAFVDVCANLAKTFKNPEILCRRHKFQVRIIKGRSYLDVSKTKLKTGDLVFATNRGEHTPLIVTVSNGLVPIELNSIPSLSLLIPKTSYVSGIMRLYSFVTGVLSTTRLHELLASCQLTIGYGGTGKSMSLQQWEKDHPNEKAVFIASTSGGVTSLTKKLKSKQIFSFEKATYMKPVADYYFFDEATVLWPWEIALIVSGNAKEIHFLGDPLQISVTDFTTSYGGRPSIDITSYLINQLRMTPTRLVVTYRFGNPLISALAKHSALADLKSFSDRATTISMLYFDDWNADQLTTALSGHNVILTHYNAHVERLRTILAHSSVTTVATIHSYQGLENDRVAVVQAPTRGSADIHLSLGHNVSAATRATQHLTWISIGCFKDSPELHQRLGEVIGALQIDWDEENESYNVVIQDGESRDITIDDEIVAVSEGTRPVNVDIRRFDLEKCASLIAHYTNLAAPTAARISGDTLYIDFKVGMLQKQVSYSKGHLDAPIGDKYKSNLLTAIEISCTGDIKDLVSEVIQVDDRYRVRILAYVAKCYQTSNKRLLLQGMLQDFEVKEIDVRSCAACAEVVLSYRGQETRISKDYLRSDRRTVTGPHAALVKEALEVSGKWDILPIELDDINYSHAILAERIDVWFTDTPRGLVSFGKWMDQFKYDNKSYVKHFSAKATAQVKTLEVENMTYVALKVSGMLTTTYTDVNEDGQVETMRCRRFKAPTMFQLIERRLDLMYRLFVRDKKIVPLIAKVYMNNVGAIDRFEGMAESFEWHKSHKTVTFKNILKTIGMQKIIALKAERKVLYLQTEVARIFKNFLSTAKVATNNHNCMGDPSYIAAEILLAYLAQNNVNPESTRYVFATPYVTHELESQVVNVVLTTTQRTAAVVGKKYYDETLRNQMERVDGASDIYKQLLNELENRSTWNEGDLGSAQFVLTSPDMMFDEMVERRIASSKVRTVITWLPNVIFYVNGNPFRKFVDGSTFAVQTTNQFENAVTFGERWTYAGHTVRVHTMRVLDGITVISMTFGELSAWASPWLETAGNVYLDVPTLILNPQSIVDGGRILSTERKLVNLTILGNLRRRLLRPNTTLEDLLVQARTLLNTAQFTTNEYFSRFNVSVSAMMDTARIAWAIHENENYELSLLEVNEYGFSLNMSLANMVGKLTNALIPTSRITAIVNTLDDDIKVNLGRLLTSWIEKIQMLTPVMMKQRKTFINFSDIELPTFDMRLLKWVRKNFVSTKRKAASRELVTLSTCGPCRAQKLNDVLNAFGFVVPNVREPSEGQIVAHTNACIDHKNEHVVFYGDLFNQFMNGTSFKGYALVTATQTISNDNDVVLNDVRLDDLLKRFVNCTVRVEATGFEFIIANIILNSANTTFIVPPDFKFNLVKFKTGVRLQRAGSQDNIASGIVLSDTFHTLVTRNWLAYRGLNNRLPGVDLSSFTDESPRGTTPKKKSNGKEATGTAQPIGWPGTDEFEHRYEFSSQGMEFNDHGIVVGDRTIHFPPHMIPNFFNKLSPSRQRHLRLQWGSAEGLPGFVYDTECYDETIEDFLILQPQLQSDGTFSVAMSGILDTERTFQLGEMLNYDLHKNIFNKNGKQVSTEKAPKILQRSVTVKSEHYVYVCSKCRSAYSFPTLLKNAVCTNNHVVYVASGPHGLVSYSPIDFNISEQNCSDEWSIEFVTSQSLVNEEVYRPIFSEHSLFDVLPQLGPIEVLPLRKNFDGRITLGEFIHALMFDVRDPDYPYMGVDQYMSFEGYDWLRDRLRQVGKPITAEEHAEKTEYISSIPVWKLIELVNARTGQPMLKGMGWMVTGGISGTILTMADLGCTVTVFTSMLTLALVEKNPWILFSSPAGFENVKPNWLDFSCCTGFAYNVAGNENDSRNDICAARTRTSKLYSTGRSLGLELAICGDLSYGIAQNGWNCIRPYIAGRRHGSRACETPLPVDTLVPMINNVYYLHHFTSWPGAQDVELGLRCTPHQKGTTGSVVLQPGCILGEIDHELLDDNAYYDRDHWARSWLKTGECRWNGKKVKHVNLAFNSDGQEERLKFCGSGRKCELTTYDKTYSDWTQDVNLVQGMTNVDSLGVVAKLTYNRNFTELEEQWLHRYMGKNQVKPSQVDESLDGPSDHELSQDEEGGSGRAPSSMSGSSPDARSHASGSDAGNGWYPMDEGRGWPAADDPSAEQSYWLNAEDSPGRFESWKLETYNVTDSHGEPVTDDNGAPIQRVKWMPRNGLDFGDVDLGLNVAGEVLSVEADEAVPMSYLHGNPLTGGTTSENLDMYYDESNIDDRWKNRQHNHHLASDEWSKQKRQAWADKLESRISSATPVIHIGQTGMMPTSHATSVAESPRTPSMQSNPADVVPGTIVQESSELINQSDLEAAEIKRMIDEASTGEQWLFDLLGCDANDTINLPSSLLDELAAADSGVVEVFNSSKLASSVLHGRYKHGLDLTNTESTHFVSAKLSEIRRVSPIGLIALSKLRSILFGLGITSEDVVHLYVLHEGVAERNTSCNKGKHVAFTTNPEKYHQRGFITVPLAKEPGRVGAVIRPIAAMLGPSCKAYVSHGGRVNMNSLWTEHALERYISTESVNFTLSPWNSLSPYMDGYVMKTRPPEWARFISINLHYGQVYGIDEYNMPILGIKKCYGLTTHNRMYANLRLHPKYSELLSSIEFAPIEDPESVMPAVPLWIIELSTHNSATMPLAWHIDGSGFKKETRGWGVSSHNDFEKWFASFIQEPVAGLRVNSEKGDPVNPSLTQGVLPNAQFEEVFNPPVSADCMRLCIKKFLRDHEYIDDAQILDRMNIPAYCNADVVRKELFAEGINFILYFSVNDTMMSESYTAQIGTFNTGPTINLHIKAQLAGMRHAILVKQPDLTRIRNREEPHVMWPANDKQGYESLTSRLRGINEAVLTGDTKDERLAEFEVSSVINTVYRAKGRIDMIRKRRRDNVVTTNAVRVFGTNFFVLAPDMKIGNGSLVIYRDSTGWVPSIVIEHGAKSYMATNDGVVPTYVIVSGAALTPPQVGQSKAGPGKSVIPSLHPKPIKLRTGLKGGFATMADKNWAVSHNHASASLNVNPKADVVWVRSFDNRPHHNDGDLYSLVRSKIPQNLRILSGERESEPTPRELMSLKLEGKSFVTCIVGGELKINVLSDYLSKRGYSAVNDELTNDEMIALVTADAECKGDAYKFLMGIWTDRFERAMQDGDDLYKSKDVSLDEIKANLPLGWEFTGTARTYSAIVYYPRWEAKASKITNKYRGTDFFDVRTGLFFEFSERRYGYMEYIQKEVDEVVVGEKILDELNTVDQLAVKKPKNEYSGGLDHDIEQAVRSLDLLNNLRYDDKSSEYMITATNDPQKPAVLYGCANMGDPINGEAYNIPASAITYNYWDDETAMVPGPIELPRNNIKLRVSEMPEIIKSIDKAVLTNYPTHAQPAYTRNYNAGFNAVSELFGSKLNVRQVEHDPIEDAKTFADTYFIQGGATNLEGVDINSQDVLNWLKSRVDTHGAEEMHKIAAEIEEILSEGLDVHGMDKFKVNMKNESRMKDKLAELLTMDLPQPDNGMPDTINEQRIRLIVWQRKGVTACFASFFLKIKENLKRVLKPNVIYVDGLTPTQISAELNKIHGNVTFAEDDLKKQDRQTDDTLIATEMEVYKHLGANPNVIALRRAVGRKWRGKGIGLKFDGIDCRKTGEDVTAIGNVVVNLIVKMRLVKMLGNSLLLMLVLGDDNIIITTGHITNEMISLNSARHFNMISEPNVSQDCGGFLRMLVYQGQSGNLECGPDVIRLRRRFEVTNGVSNNPQEVINMRAQSYACMLGDIRPVRELNLEMGWDLQLSRWYDWHSLARATACKYACTVEYVEAELASLIKMMRDRNVIIKSKLMFTSHAM

SEQ ID NO: 1340 - protein, 5744 aa, Ceratobasidium endornavirus B
MAPNTHITNINNNQNTISTYKHTNHRDAAAVIVASNQGHLKQQLKPMPGMLTNQGEPMGYRMALVKNSSTMITGKNEYLNNIGIGSKQGKHIIINKAFLKHIDNEKRKQHVSNKVRQEWNRANKQQEFKNKSLHFSLTFRQKPKCETRIAKEVIELDPAGYPTAVVKRALLIALHPDKFTFYDINEFYISIKELVETQQAAKALRLCVNLLKLVPYTNQLKVMDAKLSSYYGGITNINSINKQSVKKKEPITDTKIKDTKISNDNLQTKQVTGYGKNYNRNTKKRKNKTDKKQIIAEISKQAPPINEEANETKIIETCPQHKIYDDDCAYCYAEQRKKNIARRLEEEELRVKARNCNGENGGVPIQPVTELDYKYHNMNSPTNGKTKVGNSTFKIDRQPYVDPKLLNEALFELLPNYSDYDTKYDIEHRKYHIYDTENNQSCISIMAEKLGLNYSGERLIKLQREMHTENITELIVNIEYHGKGKNKKNHLSFESTKKSKLYLLEYKPVCNGNCKTHLPGKEHATMTNILTNENGYSRLRTRQTYNKFMYRKSRMWRLHKKWATEYAEYRAEHGLDDDNDSVISDDSYTNEKTGETNQNKVYEITDINYHLIEGWTNIFVNSDRSDETQTTHNTNVVTQIATEKNKTQGHKNKNLSELKNTIDKNLNNNEEIQKLNWQGILNDSLLSYTTDYYEKILNNEGAIIDKPNNNLINDDNIKKHYEQMAKEMYYNPDVNIATKIEALLGKCAEPPKINETFEGSFCYDERLLNMTNCPLNIADDRGTCLKIWAYLERNGECTWASNEKGMYTGTKRISNGQLYKFFGSYLRRTLGNIQQTQCFQTLNCGDGSYVLNSIPIQLGSDGKFIPTTINNLTRTRFVWWVDCNTCKRKNGFMPNWPKHATPQFLEHLRCGNCITPLYYNNFENTKREPIELKQRKLQGLLRRLGITQNLFEHIEVYKSAKWSSNVELHDHAVVARFLSQINIQPFKVDGRLTDGQLSYINAAFPDLEIIGNTISGSHSSGLYDAISDCLLTTGMRLFNNNSINYTANKHNIIEFEKELNIVEDLDNTDNGLIDCKDSYGQNKLIELMHIGVKTIAFVTPYQNEFEKATFGPLTNEVGEWQIRDDCLVILRHDENIANILDYDLTIKIAKSDIITCNNAYLVRDINTIGGLKLRVATKVPNIEFIKNLVKHNDAKTMEFTLPLLEGRSIMSLMGGTGIKLETFTVHKKLLRTLLTRNLHKGEISYQEMIVAAIGFAFRKYNLQSRTIGNFDITLEEVVSHAFLATVLIRRAYVRRQWLLDIVNTEYDWITVLKQIGLTLANALLTTLSESQGYTATENIKHIANSINSIGVTTLSDSLGKTNFDELENWLDNDEYNTYEISNINEVKNTLKHACDHHSVNCNHIGHKKCTCCNKPTENELCTCCDYITPCVHKCKHKHILDHICVSKCQHKQLTCSCCQVKSCYDPCHNCIPLVGYHKDIYDDLLEAPFAVESKQKEPWKVNRDRKPNEKIDTNRTPGTIYYHSGYKRLVVQPGSDAIIMDDGVTHKHTCAICGNDYIHKHKTDKTPHVKHPQFVGDCPVCWPVGLADPYNTTDPNDARVQPQVDKSTEAIDEKALTLELYTALLPSHGKEFLDMLLTGKINQKFYDNSNASGYNVKIPFLPEGTHMWHKDCMELDRRIQMNTEGITCGKDALKKFYEHTISTTAFNTAVGNGENMTEKDFARIAKELNLNLVLLTDPTITIFKYQPNDNFNCIMHSSFNNSINQHWEPVIVKIVKLGPTIITKNEIVNMNSIRRLIKMHTKNQTNEWTWSMSDLTKLQIEWDLYTTYTNANPGGTQIEDTKIIENGEDMYLTNNAAGQHDLVKGQINIKVPTWAKSTIFAGYQTNALTTPQLTAIFNTTHTGIDNLENEQLGLLVNHIKTYYKCTHMNELSGTTLSLKPIHVTVKSDQTRQGARIKLPTTKIWKALDIIYVKTSGGKYNMVHVKPITMDQVSYTLVNMQLGRTVDICYNNESASSAIRGIYACLTYNTNKTQLKLALSSSKGFIGPAGAGKTTRIVAAMHNTSAVIAVTSGAQRVLKQRLADQNKDPNKVFSYEGIASGTQHIPKEITELFIDEATMLRPIAISHIISTERRYEHITFFGDTSQIGVVDFSDQGGERSIASILHSLSKENLEITNKQYRIAEPLCSIINATREGGYEYIGPKDRKTEYVVETFSTFDMDAIINLVKQHGVQLILDPHNARINAYRQNLTGTTVQEVNTTHRYQGNEKEVVLVIQEQIGNTIGIEQNARYCHSAMTRVKDKLIWVSIGCFAPHITLDKRIGVVKVGQGVGKILTRLGFNQNSYWDDILLNLSKLDTKFTSDYEERDLMSSNENNRFSIAALKATAIKYEEQYGATLTAIHNDEYSEINIYYGGFTIAKFNIDDNLTVTCTYDKFNAVTKEQISELKNNLKVDTKIKPTTKYSNMVNGDTTIIRRINILALITTMFEANGLKYRILDDEQTYIITTSTDDDELSGLQVHKNKQIILEISSDPINTNCRLFHWSNQDGERFARKLGLISGEDDQYIPHSLKPLLNDNRNNNIHTNLQINRAISRASVFAKSVFNKIMPNKWGYKNINNNQSAQYLNEMQATLDLTTNIKILPNKELIKGIDITSYPIKGQNENKYNYLCHMKPNRDVILLNTIDPWAETSPECVNIIEFTDNILDNLLNNYIGRTLNKFSKQFRINTNLKGIDGLIISIEEHIAANDRVGQLIGQEEGRLGSIRLSMLDEPINLPQNIDDETLSTIQTAMPSLAANKLIPAMPMHDNNHLCDQVILLGLWSYVGREPMTIYNTMPSIILMNKMFNCIATDSPYNCTNSGFRQTHWPWSTMLLKQLSTIHVPDGENKRALNNATLVQYASANVLNKRGPWITDAKMLSENKIIWISPLYLPENFKDIVTLINTGKAIYTYFPGHELLKHDGNYDIIQNQALKLTIKLPNWFTKLIIDAEPIKISENCFLIAKCMWTTAGTMTTRLLTKFIQPGKTLVLSPPLVNPQARMVKITLPVFNPDIISNLTHNNNLLTTRTVEVPDRLLRQLRLTHAREGKTFTDLCATARVMLNGEQFTEFNIRNTYKTSPSVALDTAYAVVIYDGKLISGLKSAMQEWYQRQEPYNPSTDHIASIAVGAAGRLMELSGLNSTPKEVLRLIQNLSYGKSDNILARILDEWDKLDVSMTHTARTLNIYTSEGVKLSQYTHQEVTKARTITNKLRPYIYSNLKYLTVLVRVNGPTDMFMEPISTPDNNPKAINLPTTPVFNATIEQLLKALQSKSFDITKDEEAYKTGLLSDTRINELKRKLNELTSGPKMPTPTHSRPTTPDPDKPNTKLDWDKIKLWLQGVNNYIQTLENKSQTERLCQEYIRLAQTIEQFNEMDNIIYNNLYELSKETLFLYDNANWSTMRDNIGSLLSNHGIQLPSLTVSNLKGTRILITALGSKGDLRPISAMLNILNAWEANTYILCPREWRQHIAGTCKGTVILTGEWNLDEKLATAFSFKELNLEVLMKQLEQGLGHNCIKHNHHAILPTIDIFIGMGVAPQAKLYAHRYRVPYIEFNPLPFNVGGDNERPIQTAIRNFTSNQIMLLNENLLTEEYTKLGGGELDMRRLLTWENPTIHAYDSNLIKDLPRNKFGYNVGYMAGKLVDEPTQLSLRMKNKDILFTQGSMNHNKVGNMVDSLLNAIMQPVGTQYGNLYIQCGNKLDDIKSIVMKYGTAIAVNTYAAAGRTIYLIGNINYAKSLKKGMVVIHHCGSGTTTEMLKAGVVHIVAPVAFDQNMWATEIVNNGVGTWLNDYSSAAFQSALASAIGLKGAAANTADLPVSKPVEGFTRAFNKIMNDVYNLPITAPDIQEYMIFDLSIGKTTIDFTTLTSRILGIEFIAAESDELNNVPAGELWMDNLPDSTTAYDPPVNGPCVFESIQWATNCDPNDLDTIGKYLKFDKPRENGVAPDEIHLVTCCLGINLILRTGSRAELYHYFPGKQTIFLKASIGHCVVAHHEVINWDAGIKPVIPQSQSAMNPFNITGSHLINNKVWSILNKNIGLDNIGCSHLHGTPENNLNHLRVLLDNVAPDTNELDKPKWQQKLRDMLGRDSNVRLKDLTGPSNMHVLADVTMTDNLITTGTIIRDNAYGWLCDNNGQVIRCTTQKIHNITYIIPPASFSSRNIPMLFIDSGINILSNATARTTITDIDPDKVCAINRETVILAQQYAGASLRIFNDANPAEYLLICEYDNMAHHAYNHRDTIRLYENTKVLYLNNEHKLMPNVGLTMRLQEQNFVRAGVHDTRECTFIYTDKPEKLLSYVKRIHPQTCIHSKSLRIDRVDYRDIDSEQLIQWHTTNTDEFGRVVYNTTNLQPLPDQFDSTLGELKIELDMLNVNINANLLNKLTKDKDNKQRFILRKCGNIKHLQMWHKEPKYEGGLIIFDYNFETYILHLNNNSVVINMENYKTWAQEIQNCNFINLTWGDDQPLPSNSTYWVTNNVEKATIGDDKNYKRIYIDFKSIGKTYEECIVDLFFDNEAAVGLILADDSQPIEIGDLEINGHLMAKRCTLIYENYGVKMTGKYVDVIEVKASSYTRKYTYERYGPSEIPEWLVDRYEALQNLNGMDYANYLLQIDEEYKPEYKKIGEEEAIGLGINYDGNYEYYTRPIEGEIILDNIATQNPNFLLGKGIRWHQVYRCVGTYSQKPSTIAKDIIKHAKIIDGNIVPHYNLIVASDFDTVTVENCIILDGGFDKDDLFLLCLWMTGKNIKISNITEQLTGFNLIYNTSDVTEFAINDFNTRGLDDSWDKPTAYKLAEFNAVADLIRFSQVEQDNDERIKHIYYPYAMLSNYWKVDDNDIGKLKWLDDQNEHSGLHNITEAISYLGYQRLWGTNDYERPFKQDTDKTWNSGLGYAMIENNKYWWNKTTSGYTGYLIDESEWNQLNGARRAYKISIFNTQHSLDEYSNKVTIVPESGWMRIGGSPTFLPNLYQMTAARLKGTKVKQGEQLRDMWFSDNLDYWEKPYDFRKLPNDNEFMIGWNIHDTEKHEKPIGAIYIPVGEGKTTLAKKHPNIFVDHDDLLDQREHARLQGKPMALSQFQKNVNVPAGKILLTWGPSTTPKHIPALGSVTLQSAPTGLPEDRSRFNQSNRLSVRLLQNVPLNIALDRNEHERICLDIAHKYMPGLEVHEYTASDKRNIAAMAEHTFTERSYDGYPQYDNPLDKYVYLPYIAVDGDNVTPNESIVEDDIPIQILNFWDDYDQTGLVRIIAPSTPNKLKKPKTFEQPNKIIKTQKLTLTKYPMRSRPVNTKMVYGELNASFIRMEDHKVYRKHNLNVREEVERTCDAYFTSNWRELSKSFPTITLNDEATREWLRGRTGVKKIDKELDELEAGGFLENGVNSFNVHQKLESLLKSNPIIDWAKQQVRIIVWQMRGIAAMFSPVFMAAKTHLKSLFGDRFVYADGCRPDELSARVRLVSSENVYFFEDDLAKQDKQTDRQVLDCHYYMYQNVLRVHPMVIQIWSTGTIKWDYKGIFVRGMSDEKVQSGTATTGIGNVITNMMCHRRMVERAGKHLKLMMVLGDDNMAIFEGYRPNDRELRVEIRDFFNMESSAETTQTHCVFLQMIIGKGNNGTCALGPDVIRLRNRFEVTNGVSADPESTINARCMSYLMLLGLNETTLQIIKDKNYPIEPVNWHDMTASITTASHRYKKSEEWVRNELTMLYNYLRKPESIMKEWEHFKCV

SEQ ID NO: 1341 - protein, 5407 aa, Ceratobasidium endornavirus C
MNAYAQRQTETKIKGRTSQPVAFTKTQMRKRGIQKTKNCLRKTSNKCMGPPANGQSDWSKNHNKYTLVGCNTLMLVEPQTVEPQSNLFEMHALAVRRLLKKKTNTTRNKPTKCTNCGPLVWFEHSDEQCPKKQQPPKPGMKGQWVDGIWTSNKRLKRMRRWNNKQRKRMSVLNWRKHWNAMMVKQLNAGPTLASVLRLNCSGENYNAKYRKYFGKAAKYTDKETSLMDILENTRRLHAESIAMLESNEPMKLGGTGDCWKVLPIPIDFESILPPVTVNYDKKVYKKFMALVSMRMYTDVAEAAFNMNLPQKWIDAWSSPLEISVILDAISEAADQAVINEEEGKDVEVCYNGEMMPFLDLYEAPGEFRLSMAIEGEQLNMHIESMDGEGEFSLKEIEEALITIEDTQQLDLPNKTRLKAILGVVPGIFHTTSIQSLLNTGEVLETSKWKALVENRDLRAAALALAKVDHHVYSIPGCGDRETAEKMNNPDKGGWALGMNVQYTNELSPNSWVQAFPEAAAVHISRQMFSDRPVKIYAKPQWLNPTDHLNAKDKAKYSLAFFTETSLNEANLQTALNGCRQMVAVLPTYNEDMPHLSSNEDGNYLMRRVATDLEVVREDSTQVTTHNADIISALNKKDLLVIGGKLYKVTIIGTVCHDTVVSLTLLEGTPKEFSNIFALDHNSTVKRYTYTMPKFDATLGFMMPTFETRTVDIDDELLRVVFTHNLHRGDLDFRTLLTRCIGFAHRRYHMKHSVKQRSDLSPQQLIDHALLAALLVRRAYVTRRWLADLSNSPRWAQVAIKGGFGLANLVLQALHEHSGTYQKFESWMEQVTRVSGSAIKDFTNQAVFGEIEAWMFRAKTKAWECYSVGSKSLTVSCLHHDDCTHTGPMSCLCCGQPSNRQWCTCCSRQLCRLSHSCQHSCSGNHTGSEVCTCCNMPSDEPGTCKNCKPATDMEYDLDYEWDEFVEKLKAEGGKPASNSAQPVLPEGMIMPSGPCSQLSNGQYLHKCALCDRHYSYIHPLCAKNPNHFQSAKACPHCSGGKAQKTDEYGIPLKDEPKEIPGGWRPAAEEEDKEPSPRSRNVVVLLKMGHTLSECLAIAGSGESYNNLYNWQGDTSIELPMIPYGTQSCRVIATDFEDKLQIQRGVTCGLAVLQTLTNKANEADATILLKKSDTYSSGDMVALAEAWKLNLILLAEKEIVITKNKDSEVFDCILANEPGHWTIGTATIDFKDTPLLTKAGSCSTQDVTKMRNKAMAKGGDPAEMCFSAEIVLCSERRTIEKMFKAKIEDGHITNNARKAHRPKAGLFHFKLPDVLPKHFQACFSTEPYNAYQKALEMEWKHSALTNITSEIANRLLEAAMTVASAHCLGQEIKSAHREHAVKVESDSASQTSSFLLPADGKWMDGDLIRLTNSSIDEFFNVRVVTDMDRRSKAIIPKPNVTGLFKCRYTKGGYVSALQTIAGLLPLYARSVSEGQNSSAIPHKCVIGVPGSGKSTRILSLATRNDLIITATNGNKRNMRDKMKAKDQKTDIMGPLELLQAATAKNHKNYEKIYIDECTMVTYLEYLAATSLLNNHSQTPFAERIELYGDDSQIGATCITARAQVGTPTGLHRFATEDNTEHWLESYRLKTNAAEVASKVTGKAIVSKVGGNLKITTMNVNDPIAAYQSAVKQFNGKDFVTLCFNRDTQIAIQKRDSSVKVDRIHGFQGQEAKKVLVLQEKPTAKGSVSTDPRYTYSAFTRAQDHIIWVSMGFNSEESIESRIGMRHKVESHVGQAFKDKVKHFMSILRRKPEVKIRDDVLDHYFNHVVAPKWELKHISEEVAQSIRAHASQKFGASVTFDVHGNSDVMAFSRGVVTAVVLHWDGKDLVVKQDTFKAINNTRLQQIHEALKGAEAPRTQVQWETVMQITRKQRRCMDIVMECVKQTENIGLLTSIKSETGILTVESANTIDCAALKLVGSNGVHYLSNPDENDTIVSSSTEENTAELLSAMERWVYELCGSHDVKAVHRVLAVTGAISKIKSMAASAINATNLMTVDLDAKLKQETAAAFESENRANLYAYQKMDTIEGSQFSKMHPARLRKTEQYGWITRGRWIPISEWKTASAIASITYVDELMSGWMPKLVEIITAAETLVAGAVGVSIKGWSQHMEDDSATGQYLANKVAQLRAKMLKNEPKPITWTPGARLAWNDLIAISMPACGMHYTSAPNLVDPNWAAAEQVALRMVPSHKRITHVTVNPNATLLSGRYSDATARPLGNASGHLYDMSLEPMETLLNRLTKANVEKVNIPEAKANLENVIENAKRQLAGEGDIWCGQYDTKVQHSTTLVSASALSQSGMAEQGAELLHYLNSSKELLVITPNLDPHSRRTVTEVMDTDLEMSMMTNTMYGVTFNACRALRTGFATGRTQMNGVDLSVDCFAKNSAISIWKIQKEKRVTKYSPLPEYAKTGMQTVELPDITPDLMTSVLTKKAVTKRKLTIDNRIYRSLNLRALREGTSFEDLLMAARTMLHGVIYSPGGTAWKHQSDSSILMDTALVVFVRCRKLLNNAIGAARMLADTLTENPLRNTMGYAKDLARGLAAQAQTVLGLNYTDEMWEKALASSDNKVLHTMADMLHTWNFKVNDYHREILHGEAVEMEMPFDQPVPAITRFALANLLHWRSLGGEADHQPRVRRYTPPAGRKQQLPVKQQLRDALTKQSAWWMVEPEISDQCDRLQLEYDSNPSVNIGIWGNKAKMNKVIDALANRNLKMCKLLLTDDKTNLVDKAGTQKVMAKLASLNTTLNSRKVPAHFNQTATKAVAVAKANPGWPGFTSKFCNSILEELEDLDNANWQELASLLEAGFAVGGLKFTKVRTASINLNTSNIVIFAIGSRGDIRPAHNLAKQLSLDGASVSFVCPSNSCEQTGSINYVTGQYDVNKELDKWHKITNFGPETLSTIFKDELDNNWIRGLDYDSLPTTIDLVIGSPVSPQGLMYASSQNIDYVDFCPMPLSNEATNTLQRVYQRLLSREYVLLHLKAITLDFKKLSNMHFDVDKLLTYPRPYLQATEAKLAPAEKGEVPVCNFGSWGSKSIGETWDSIADEMPLGVTKIVTMGSMRDPKTAEFMLDHLDGAETVVLAQQGSPLYEGALRKGITVLTGNYNLAEIPTSTTVWHHGGAGTTQELAAAGVWQVITPVSFDQKYWANRITEAGVGGMFTQDVGDVSLLDVRPCEPVLPSGMDVRAQGLCSMLTKCYGIGVTWVPKGNVFDMKAANVLWWNQLIGDDFASEQGGVFLHAIEDKPRVTFDPLIEQRELGERMTCGARAFNYYYDLAEGDLRLRLKNIGLAWADLDNNGMTKDQFTQLALCMGENVQIYSDGLQTTIISQPTKAIRAYWWQSRGHVVAVETNSTLGDQQRHNVTMASTPRLNTTKCTQEPLAVSWPTEINGQMHPDMHARQADFEEAIRSALSGEPMNTNNPALRSWCGHLNRITTDRVKSNFAISRRADHSWIGRCTISTGPGNAKLLTRLRIGELVALQMVDGTATLGIVVFIDEDGWSHLVTTINPKNATGLYITCSTLFISRGKHTGTVTGTKAWNNQTNAVLGTDLPIVDNNEERDLRATKVLVGHYDGIPHHWSKSPAAIYHAEDLLFGEGMLPDAEMVQHLTKYAGILRGAVFGDQKLWTVPIIDKDNLARHYIDQYEATTRFGFSFENEPDLEMLRSLSNGLVVDSGMHNLEDHVGYFKLTLTTKDFASKTATQLTEMFGPSDAANPFLEGVNYLATPAPHGVYYYKGLNWSVAADTVRKPINLDDLVNGAENYYLVYTGNDADEVRRASDSATAIYGKGNGLPQILPSVANVKVAANKRDDLVVLYSDDLDVLLAADKDRSFCPADAVHGKDVHLGPPVKGSPSGWGFDGSGPNKLGLSTDWRVSTKDHRCFQVTLEQGSMYDFDQLAQAHGWEDNAAQNELLAKYKTASYVLMDLEFNGEEFTMTSFGFRSWRGSFRPAEFVVTSSNNSKEGGLFDPSYPIGSIKYRENERNEFRNGNSTKMHHLNLPDDWSTKPATSAANDLLNSLANALCKIIEHNGNKRVIITANADWSPEKRSMNATYINLTYDSRPQQGWVNVLAPDVNGYTTSLRQLRTILWYSPLPDRDWLVTVVGGRDDFNEVAKGSRADLPETRGVFKHIKTVGGAQLYLNNCTGHAAAGAHLWDRWVSDMQHTSHIYGTDEWFMAQYTCNHMRTVMTLDQFNYEPMASYPRVHPIDMLPHWFKKEDKERVMQMQSNLSLTNSEDDKAIATRICKISKPHHPSATPFSRFQVPAMQYATSIDGSVVIGGATYQIHENGLLGSVSNAWTTILNPKTTEQINITQGLPEGCLVITPDVTTKPTWDGPIVSINASHPCADQVVSLPVHSRGELLSVAYYLLLAGKGKRGMLLTDQTAHFVGTAARASTQPGQIKLYGVGNANGTQAIGVIITSDDINVAQRSPSRELASISCWNYMGDRAFGDKVTVAQNLPTNTPRWDVRKYKSSQNITMDCEKEMQRSLPAEFKQSKLIKIQVTGSLLQAVRGQVVSTSQLVAEATAIMAALGDGPMAEDAAEEIELLRSLGAQTWQIDANAGKNPSWCSNCAILRVSKDRNNTDSVYLKYRGATVKPVRAGMMLSSQDPEVNDNVPEGVWMDPTERSYDGVPRYTQGGMLNQGGATHGKGQSSKAPTENLLLAYAVAMPEDEYEIMMKHPGSAGMEKYLVHHRDIITEKEKETIKKMDDPRMVNGLLRVISRRVEPGKILVTWGQATVDKRQIAFEQSIVISGHQSTGPNQTTRDLILFDNGRYQTIIVYDESEAADSIKTLRKRQLERNDTITTHNIRHSALDEMAFNQIHDYRGEIDASGSSAAINNFAYMPLTDPMFGKTEGYVTHDHAPEIPTDDIIAFYENKDLTDLVRVQAPLNKGEGKGYKGHNFPMGIIESNKIALTPYPIYSRPVLTRMAYALENAVFNVLASAITYRKHELNAAYEAKMFVKTYGNEEAEENIARWQKNKLYFSTAQVREWLSGRTGIEAIDQELQDILEQGMFNEPLNRANVHVKMEQLLKSDPVTNFAAQQVRIIVWKKKGYAALFSGVFDEAKDRLKEFLGKRFVYADGLTPEQLGNRCRLETCEGFLEDDLTKQDRQTDTDTSACEYQIYRSVLGVHEDVVQLWEMCSDHVYFKGDGIKGNFHKIRETGSKTTAIGNVIVNLLVHRRLVDRLGPNLKLMLVLGDDNLILSDKFINAQELRREIRNYWNMESKAEWDPLSGVFLRMLACRNMDGRVQMGPDFVRLQRKFEFTNGVSEGSDEAVQARVLSYACMLGPLPGVMDAISNCDATVEPVPWYDPVPQFEAVGEKYYPNVPLEHRTAAVLDNISRLTSMMRERHIVEYSWQHFATDSKTRDIGSLPTGDQTAK

SEQ ID NO: 1342 - protein, 6359 aa, Ceratobasidium endornavirus D
MVKYRHAGVNMYLRIRRAMHMRIMLTVTGPGQLHLLEAWRDEEPPEFESAIMEPHGEVLCTNIHELYTILHPELWASYEPYCHDTEMALVNAEQLSEEWQAAEQQINSLEVKNKILGAPIGVVRERWSTPHVGDERSQNVLGIRAVILDGTYGPWGPKVGVSQLMSLLQKTGLVGPSAYTPGTTDWNNAVEHDLVVIRGALSRLMVETVKVSHDMDQSAIDSLERDLPNVTLAKVPGIPNPHSVLATVRKVLHKLIQESCKEGIIDVGGNPRHNRPMDWTMRPTTLIEDVVRKITSPNDSNTCEHMLSECTCHQASGKPLLFTDSIYDIPPAEVVAALDLRSLSTFYYTMTTRHFNFDDTEQQAMGFDQGVQVVSGETLLTLTSGESSPYENNYGNTKFWHSVDVLYTGVSVWRVFTMHAAGCHILRAGIRVVQSVDLYREVRLLSVGSPAETIMVPVIKRHTLLSYAGTDYNIVRVPLKLQPDLFNQLCDRNITGTLGLDNLVEYGLGIAHSKYSMADKSIGNMHISAEDVKLHAYLAMMYMRRVHGGIDELLNQVNQGSFEQVSTNLVLFGAAALQGMAKRASPEVRQLLKRYANLLDVTTLRTKGLDGEPVWDQLSLFRAKGTTRHLNIYDCASTQDAGAALHGCDCHTPGCWHVGEDSCNHCGSPSDGDMCTCCKMEHHTHKCSHNCIYGHATSGMTRCKCCDVIDDCNPCKNCEREPNLYDTIAAEMLAPLVNYMEKGAVEKVVNGVNKQGIPVRKPGGVTIDNGGMEHTHVCALCGNSYMHKHNWNYLQHPEFVGDCPWCEGGKKAKKVGEDKRVGPMVAIKEPVPRSWAEVVSTPRPGQQVTPSTPAVKAPTTEPAQAQPEDRGEAVFSGPDLSTVSKLIDLVGPFVSQCITEGSEAAFDDLQRTPAPQYTTILYATGAGMITFPSDRVRVRNMGVMQNYQDKKCVMHSLRVVWQNPPSIMEMESTTNKDGMLSAVDVMLIAQRYQRPILVLHREQEAFCYHPYGHSGPTPTIFIHEIGSGNYHCVPAEGVQLGLHAGFPWPNCDLSQGDLADIIGQQLPSFDDLTVDERLAMYDPVLNWWNNVRANANSSSTAIMFRDGVISNVSVQTSKVKDTGFSIDVPTEMDNAVRACLRGDAKFFTEDVSTRSTGAFSIKERLRAEWMLTLAELCNALTTPHVGSVGTFIKPLVSHDKRGGLSYFTVPNEMKIKKFDMVHFGGRVPQPRMVIATMMSKGGGTVVYVKLLDDHTKRDTFIPKVNSGSAIRRLMAVSRCQVSDDFVQGIVMGAEARYGVPGSGKSTTIASEYDEDTTVTAMTSGALDGLRSKISGKNVISVERLSLEKCQTSTLVVDEASGLSVTDLALLLTDKVKKLVLYGDPEQVGIIDMHSVSGHRTHYSVMSLAKTKSLNLTTYRIPKAVGYEMRDIVPKLKYGHDRDGEVVLEWQQTADISMFLTRCESMHVECIYVFYSQHLSAVTRAIKQSNYKGKVLKVHSAQGSEFKRVAVWQMGATTLDAGIHLKTSYCYSAAGRTSDFLYWCSVGCHSAGSSLRDRIMNTSPRGQFPMASGTGVLDSVAELLNLARRPFSQTINDFSSTGAGHSKWFVTVATQIHDEITHTAATRRNKVTIDYQQGGRNRYTVKVSDHLGSATALISSKILMLEKTGSGPAVDILSEVLQSVAEQPLFKNLALVRDMNIGPCGESLVSFMSDVLISTGANVLEVSHSDVDGKSTGICRTQVGTYKFTFTDDRFDLEEEPEYNTEWPTDEGQTVANLLVYIRTLETMADELSSAHEPTGQGTTPYERTLDERGAVERLKSELSTINPDVDLVVERIANTERVQFAVKIDKNRGWVKGKVLRAILEWDATLGRMLVIRYKVAYMAVGKCPSAEDLERIINNSLTGFRLQLGTETIPQITVSPETGVAAQDPPQVPVAEEEEHIPASSGGTGATTRVHALNADDDPEVVDQISPNLMPGTARWAMHIIGKCFADISKNPQHYLSKLAIGSFAPVGLEAEVIRSMDLFARALARVYPLQQTVTNPLTNEQVTWTAIIEDLDTLGVPYVRGVASVSGRPPLTGGRIGAPLSANGKNCQCNHQHDKKRCYVSSTTIRIIRTLAVLSHVVRGSLFTLKVGGVTYKGTAVKGCTACAGLLLTDTNEVPLLKIGAQYENFWYRDVYIAPTAAGCLAAAHFGFVITTKHIDQGTPFATMKEPKMLKEARALCESIFVVEASHTLGNREEESWVVAERVYNFSWGCFEYLIGKNQTKGASTTAMIMGGMVDDSLGILDELTAICRKLDWNMTSRHLATHMECDYTIQDAKNQNGDDVFYFAKNWDVIINGGSPQLAAYCSAMSDAGVVVYYNLDGSTITVHYLPSLNILVQAAHTAELARCKGHLPLVAKAYEALKSFGANHDTIHGLKLSMDIHRSETTKVWQYVRDKASQVENMRHGGLATTQYVPQLLMNAVDAHDPTLSAALRLAGHNKPLLSNGVDAGIEQLHDTYVHYTVGQSRVTSVTAHPGNLGLAGRWTWNCQPPTEINKKDWYFTQLPMVRSMITDMIKVLGNKGLETDRGKMLNALLQHNLKPMFNSTYRNTAQIVNLGLQLAGLPLTELSTYATGESTVIFGLIPKQYIPSDVANWNDDLTVISYLGSQVDYAIRSEWIQWLRVGGVYSCAGYTCHVAIKGELFFHSLVRVVLTKAACTLPRYHSNSYDQVKSNFVTYRVPILNITAFRAGERGIFTSEVVPVPKKINRLLTLRASRPGTSWGDMLQYLRTLRYTSYYSATGVFKRDKSWIKQAIMWALAVYIHDAPFLQLIKDAANLAPTTGLSGNTTINVLVDRAGDFAKGLLADAIKSLNLDLSITEVATIAAKYADLLTNRGAQANELLGYMLDSSVSRTENQVTFTRHHNGAMREISTRTLDPITHAEDVMALHNTPQNVGGGGLAIGRTVTIDHDYRTPSGGLAVCFPSGTANDRMAVMEVANALAPYVTLRVQATLTDRDLVKDATAGSNLETAANAWARNIASVSRHLKEHEGEKHGLVICSAFDVPSMYKCYLSGGILIRVSGMAMTPTNMIGVLGKPGVGANSVGYPLNTLMCRSWFRADDQGVIGKFLEWVNQQVLYEILPEWCCSRHGKPYYGWHSDTTMKKGGCKTEVFLYLKGSAQITESVLSRMGLTYSLYDPTMSDAHSVQHALDFSNPGAVNLMIHAGGVGTCQSCIDADIPFVIVPEFGDQLDHSQWFHWATLQKLEELGINKYAEMHRHELIKKTSASRPEKVMGQLVAKTMQTLSETYPENYPPYNDGSNDVKDELTTLWDMACQDEPNAAGHVKRVGSLMSSEYKETIEAKLMRTQDEVFRARARIGAQVVLILINDRSTPKQYADGQLVVRINPTMKDATSHISIHCERSEEEWFRLSLTLMNFGATTMALGQQPNAAIARWRNNNQPGLVGIIPKSAVDSSWITFIKSGAIHPRRGKYAASPIDLPHLVKVMCMIRSVHSSELGCSYFLATSEALYIDEARANWVTLLPNVPSYQLSDGEVVMGGLFHPEGTFWTHRSGQKDDGQPDDDDDPDTGNSDDGDSDSEDDTEYHDAQTDQAGRIQALAARYSSAEQQPSDDERVSGTEGPARFDQRAGALAVPPPPKSNLTGLTEIEAIMSEVEQRREARHSGGSSSLRTCAEMRIGRLVTDPLDFFYGAAKLVAASAARLPGEPPSIALVPEIGPNGSLSLEGLFTLTLREVTSAIEGRDTMTIATFASLVSTMPDLEGRLQLLGTAEDKAQIRVGLTVMALLRALSLSQAASYVSAVTWRSVINDVINSVAEKGMIEAFNVVCTDPYDPVRAEMYHGTNWLLDPTKAAEAILDEYLSQGKYIHPGNIRAIRVSPELAMCFMLAVQTMQAVVASTEPGNDTVDPAVQLIQSISSGDHDDNISEFIGQTNDTAVDELVDSFHINNNWVASKIRSAMYGFQRSVRIGKKFHPLRDHDGVEAIKALIISLVQVRDGALACWAWCNPTVRTKLQSSHKIAALIIAKLGRPFMSLGSNHPEGTTLLQATSQDMSRITNACSDASAIGHARGMALMNRVVRLRMHVDGEVLFEVNDDDLATQEHADANNMRGTFLLTHGTYDGFVDGRDGSRTARLTVATFPEASCRGRVVDPVLSPKNQGGTVMISRFGGCDWQPASWSWPCHIAIAALQRISLQRPHTLPVSDIGEEENDGEQRPTTEGSAMKNNKMVSWRDGVTAALPVSTPPTPRSNLEMLQLELDFTDEGTLSATDSNNTTELLVLASHSMHNNRLLNVMLREHNELDALGVNTTLGNLYLIAWSELHATMTAQEIAGEERQLVDALMAMARVLDGAGNDLMAAVEAYENNRLTALVLRAGETVSFAPAIIDICCSGLWSSKAVTRLELLQSLTGNSDEQSESDEQMPPSDDINATHTSATSEDGEAFAPQALPDGWATLPWHVSHFINCLLAVTPSNKLALPLLIPCVDHQTIQLVQNCDHPLSGNSCFIHLLNSISEETLPIVANIVRQMESDGQYNPLEMLELKTLVGDEFGLAGSDPVSPRDGDLGERGNRPLDRVRRLRSTLKLVALRALESSGSSGLASGGRVPSRVERLADAPDPVSTTVARNKRVKVDLESFKGKATALTAVVDAVNSQGKVKYFSYGDLWGIPDCQWLRTLIDEANKNYTPFSHWNSTGNVRIGWPNGAIQLIDSLENVPSGAWVCDGDSTPKEALVEMYHAYVQRQTGTPIAKNPRRLKKKADRVAAGKHKLATAARKVAQQYENTTAMLLKEVDDGTISESVYPLAYHHPKYVQYENNAEFEAAELRRANNWIKRCRNSRGGKYDLSWVVDLAEMIPPDWRQAFVDEFKGGVPTVTEKATAVMVQSIGPQPPHLDAVLTMFYDCVVACSEMAMPLNKLNRLVSRCWPRAEPLDFSEYDPSPFVDVDHRHEDAVAFLMLFNNKNHNQPAAHLVSGSNESVAPPSELGEPEELTVMSEELGEVTVANTTDNRGNYTRAQRLGNVSAYDLMWEALEPLNGVETPVEYLEWGLFDKDSMLIYANANPPGVKYSMYGSFNADLLKMRKGLLRARSAAVPPYTNSDNASIWSYMVAKLQGDKTKIRPKPATMVKFEVTEEEEEGNALELGDNSGEEQFWTSYRVTYDPPFSDECCSLCFNHLGLHLDRKPRHTLGDIVIGAYNNKRNIGVINGEGVCTLTTFVTGWKTIYLLLQLGHCSVAEIAGNRVNAEPVFHKRPSALPIAYCGNGGGVAYYASFIKQGVCTEHTHTPYQPLLNYLLNRTDTPAIVMEGLNLNASKAKAIRASSKGKNLWAVRNRVNKPLVHLEIKPTDDGYITMEKLLPYRLYFIMDGELRPGFSLPVGATGYCNIYTGVAGNKPCSLIIDGGTGFVDTQRPVSQVVGEPVDRALTHACRAHYQPDHGALALAPGPTRKLYVWDYDNRGHHMFDLRGYLYTMPAENVIIPPGVSRQWMERMRGDQLAIRLSIKAGAETVCFECNSLDRKTTVKALRGMTNTAWSTRGDEYSTKSLDDRQCTNLVMWLLHRFPKSKEGKLIRRLADGQTYSYTKIREVIGNDAVTELGLSQGQYVCHHEKSIMNFGSTKGGPTLVEGYTFSQSGERLPDIDVMASAPQDNKSADHAEGATFFSEHKQTRMQDPWAVSVVRERPAGIIYLASGGGKTWLKTHNPDLFADSDDLVKVPAITNWESWTQGHWTARNEEVRAQMFENRGLCVGKLLLVWHPDCVPSQWRGVKSLYIIINDDKGERLFNIGNQSLKTIIERRPRLPHAIHTREHNERVIHEYFDVANRRLQPIRALAMAHMQDVDYYDFESGFINPGAKPFIPFIPATPQNTNLLDAVDPQIDEVTVEAINMFEIGDLSDWVERIAPRDDLVIKSREKPGQLGTTSKTVMTRYPVWSRPVFTKVVHSVFNAVSTRHGTVEHLIKHKLDPKAELKRFAEAWFKPGWEESSKKMKSTPVGYDPQATKRWINERPDGVKVTDDLMEILDEGITHNPINAWKVHAKLESLLKEDPINAPQQQKVRIIVWQRYGYAAIFSPIFIEIKKRFKSMLADHVLYTDGYTPADLSARLRTVTGGNRFFESDASKQDRQVTHELSEIEYLIYDLLGMSTEALQLWKHGSVKWRFDGVNMSGHLDARMMTGSSATAIKNVITNLIIHADMMIKNREHIKIVLVLGDDNLMVVDTVLDLRGYKKKAAEYYNMHMTPHSSEHYGTFCQMIAYFTPEGTAEIGPDYMRLTRRYEVTNGVSEASPENLTARAMSYAMWLGDIPEVQQLVEEKGWPIKPMAWYSPSLCLRAVASKHDMSEGHVLARLAALIESMRNPRPTTWSWQHWTTLK

SEQ ID NO: 1343 - protein, 2439 aa, Ceratobasidium endornavirus F
RGRLKDAPEGKTGKDFMDVMKQVRFEFYTSEPLLGGRRCYVLPSVKLLMKQINKLRSLTRSDYIVYLNESINSIAALERHLKWYMPYCELDVFDMKGSETLDLIINLITKINRWVKEQMVKLKTLAVLTWQNNFKRKIGKTIILTAPKPNTPEIIKLTANVEDIEYHGDMINHLIDVLSYDNYHLLSEEIRFNAGYLLMTLIEPEAIMSGLIDPMDIEDKLKYYVGKVDRSTSQHKYHLIMCLLRVVPYDVLTLINDRNKQLIVDLGELSHIERLQEETEEYLPIDQKFLVEFVNYCRSANDGEEYMPMNGVKLMSSPLNDLNGEQKSILETKLLRVMNDEVASMGKNGSHHDWLNTLKSFVRPMVPENKTINEVLDGDDDDKPVNHDLKNENLLRKFVKFIVKHCGPLLQNLLNEGKSLMAIIKNSFILMAKAIQNKLNYISDMMANSKLFKNKDRATFKTLGISKVKATVLLREIYTPTEYELQIATKWVMAQDNVTGWMNVAYQVANMNQNNQYANIRAWYMRCSQSFGEVEALTKENILDMMASMAEMDVSVVTSGRRADTLYALHGIVMLTNTEEGQLLRTITTARIYGINDTKFITCYNETTRQVLKRFSGYDFMNERDASLVLMDNYHKYLQQMHWSAKGYYKIEYWLGNGIGAIRNASSKIVSKLSGLIMKLINVMLMGCDTLKNWVGVLGSNLKATYKCIIEWVKQKLGINSKDDDDQEVKPVPRPRRSSTGSSSSGSDFTLFLNSDNSSQYFTGENTPTGKDKGKGKMVYNDQETSDYGQYTADEIAAQRFEAQELLFDAMVENQNYNEGTSDPKTKAKEALLREYMKYTTKSTSDDDQDHEYESNGIIFETDDTEIEDQGGLFYTVKKIMKQIFDCGYQGVAWLTDLLKKGYELTWCNLIKIFDLIKSKFGPKKTNDIYVVFKQRNNANHMHVGETEEDGSCWCQAACVCVDAESKVIGETHSTMFKVSKTNTTNCEHYNNLKGLTNFEALGKGFNAIKTGKLLSVSIINGKVQRGRDHIHFKDQTVVTLVTSGNTQIQLIGTFYKQDNVLPTGDIMTECFNLALRYENEILVGTANHETAGNLIKSNTINSIIDEVGPQSRLFMYDDGMYFQAYTTFNLHCHEMFSKAAVKNHNYNHFDATTIWPSYMRDSCDGLDLATTSVRSHYARNSHVRNGQIHWYESTNGNSELMGNESRKSLSFATGVEMWHDDNFIGLNMRGNLHWSVVNEGPLRIPEFKAKLKSKLIKINDNEPNVECESETCFNAIMMSAAMVPKDQCVKGTAKSVSTFNGLISLASANGMVCECELNGVGSLLALSNHYINEHDIGKYLALNCILVKDKHVGISEVINLTEITELNELDMMVNQNPVLAIAAEQARIIEPTMESTVMDNFVGEFPPKKIWKGWKLVETNQPSVNTLKLIQTMKQTGPGEFKYSYDVLGNRGEVKIWVNDYPNIHESSELILETHDGIKAKLTSGSTRKMYATKPVDATLKFAITMLMKTMGNKRTSGKHPLLVILTQLRDWFKRQKALMALRWAVQNWDSLIHVRQTNYIDIRQEIRNNQVLAVWMKHCNNVYHDHHNIILRDLSIGNMLYSVHMKLVGKEIVVRTYCNVRLGGKTYKSTHVQDFLKPYTLVETKLKLNHKVKKTVKINETSSMGNALDVYANKVLRMMHEYDDDENNTLRTLIRNNPIHMQMKGGHVNHGKRFNRLGSSSVDKLTQTLLQTSFTNHRLVCYCLPSGAGKTTLKNKHPNKFIDIDDVMRPEDFVDVKRFQLEQGWSMINEIYKERLLTFLAGRTFDKNIAVLCHGPSQVEDVAGEIHFIIPNWVGDKPFSQSNTDSLNKDFKTWEDKALHSDKFNTFVYRPENHQQVEEYCLKNMSGRSVTFREHNVNDLAERLIDQNIAEPFYQYSDHTNYVKYVLPADGKVTSRTNYHSKPTMQEFSVIGRLPVVNRPVVNKQSNQLFNAITSRLFGKEKLRKNNVTVEEYYEFAKELFVDEADSLLDMFKASPIVSIEEEVLAWLEKKGGKVAYLEQCYEYAKNKQQEFTYKKMNAHLKDERLMKEDVQHLINQLARVIVWHGQEKAMVLAPMVSAAKERYHTLLDRKKCVYADGMSPLQINQHLKKVKPTEYMIELDLSKQDRQTDLPYMKFEHWMLRQLGLADVVVNYMDEYIEGFMIKTMNKIRAHLGTTRATGGVMTGLGNVLRNHVLLGHIKQTYDFYHVMILGDDSLIFTDVDFNEEVVRKIASEFHNVKVTYSKRHDSGIFLQYIVANVGGKYIMACNPMRLMEKFCVSKTINNDFRSKVGSYLWMLGSEPEINTVAKVLDLPLPESQGTTKEERRLAQSIYLECSILQVDDLIKDILSMMVNPKVFHYKVIVWSERIIYSQRPDYRPTTNEAPRFVNLENYHELIDRQDEIGKHQKLWDDFNEVGF

SEQ ID NO: 1344 - protein, 4905 aa, Ceratobasidium endornavirus G
MASHFDLEGFKXVKYDDSPDQQPQIVETLTQVRCPYCYTPLITTNTSQENASSDLRLVEKPVGNPTAVLEMLRSLFGPEAGPKGPVWATHSDAHDQRLVAMVLARLDFKQVTIEGILTREQMGKLTANFPTIIVDTVEGLGTLSDSLWRAELKACITLALAQHSSGWARNSLTENTDIGLASSSANADVTLVEFTANHKDFCNTTYIIVPRCVPDGMYEEGAGSCSLVANTYLTLAPGHTEPTSVDRNAYDALMETDYLLVNTGRDTTVYRKDIMAQGEYWQLLRLARVVGQNLHQFAKAERQDLTIEVPMFDQRALSSKFGVSALTMRKTTVHHKLLKALTVRGLGNPLVSYQSMLDLALGFTWRRINMHDRTLANTDITPELAATHAWIALLLTKRGAAARNATAEVAVSRPGINSFALQSSMALANMLIKSVGATLGITTTEWVSEVALDWTGSRVTAQQASAALDELADWLLKPSVSTERVAEFQSLTPSRPACNHRHYKCEHNGSKTCQCCGKQANNDICECCEPACWDTHTCTHNCYTVPHTCAIQCQHKPGRCDHCSKNGCIENGKCNTCRQHDSIESVEVDIHDWVAWLESTNNEGSNKGNTKYNKTKPKRISHRMHQSLPPPIMPDAVEVDDETATKSWPNPQIGTEGNNHSHRCVGCGMLYECKRDNTCQQQFEGDCLHVTADKPDEVPEEEAKYAEVRVRLLAHINEHQITALEAESGSRWPLPSREEGSLHQMDGWPIGTTVESEGLYAVGDDETPNLDTSAACAREVARYCWPTMQSNIISVGLSGATATDQDIIKFAEKHSLNIIMITALNTKIIRNNLSNCYGVFIHDSYKGGSDGHWYNAKIVQVKRPASLITFAEGVNNQMLKALAGKIIGGIPKESSGLTSYERLLLELTIHSSHKAEVSITYNDIGLMHTTKGPYLANGPIHDPQRGYVHMRIPERDVLLVEQWLTETWSLDSDLMKPGTYNHMSFDNLEQVRKVQLMGEMINYKMASSGNVDFCNGRYKLPNYTYQVSTVSKVDMGYAFSMDGVFLKSGDWVVVNDGKETFTCQIKLNPNFKGKRTLGVLLTSRKLGASVNIGYTATISATSSLVKICSAINWKVDLDGFRRAVENPVISVEAPGGWGKTTAIIDKWQPGQIALAWTSGGKTALQTQAQAVKKRHVLIQSVEKVMAEGLPPGVTEVLLDESSLTSLYDASLIWKPGVKFQFFADNSQVGVVDFSPMAGLRSPVGVTKFVKTGIAKYNHQYRYAEPLCSELAKVVPGLTYAGPDKRTHFEVVNEDAMNRTTYRKLINMHKPDIVLVFYRAHEQLLKSWAEPGAVTIDNVPKVKIVQELARVHSFQGNTRPRVMVLQWRMGNTPGIETQSTYCFSAATRVSEQLVWVSVAMFDQTTPLHERIGTVRGSGINSNWRSLSWDMTMAKLRQSLPQAPQGEKLDEVLSVMKKSAPKFEEQYGVGVSLAKVDNKVYLEARKLGIHILTLEINEQLDVNVQHDPTGSVTQADIAVIRQQILDSERAVELSTVAVTEAWCQNHMMAYHIAVRAADVGFPIDLSIGPINVKLLPNAADKYCKMNYEIRDGKNSALVTVARDPLHGHLIQFGLTGNAELAYSIMTPNMEQSQVSEALQNLLGRRIDAHRFVLAHMIEDLGFTVLAAAMNLLNFMGISKDKADKLVHQSYINNSQQIVREMKEAVTNLDQTEGTHLDWWKATSHQPVKFIRTPTEPGPNVGRYKVTHYAAWHDANTSELEWVSSDPGGEEKEQQVIKLWRHVGRAAVNGIGFNLLDNLGLAVSKVGGLPPIEGLINPISDHLARNTEVARKIGNYMAAAAQRSWNADPGPLYLPRTWDEDACRDMLPGRKINWTSELVPASRGRPLLCIALLNMYGNLGQRRVMYCNHPQIATVARDWNITVAKPGTSQEHSPDWSDGQKQLIKTCEAITSIEHNDAPERMTDGLRLLQTKMQEQLVSRTNGPLARDGAIRPDEFQGCLIGPDVLWHEASIEELLRKHGELYCMLPMGNDWQETTLENSTYLVNVNSGITMPKQFWHDSAITGSLLKLSSDLLLQAQLCGASHSMFLVKLTDGSKEPLSWFAEDMVGPYGAEMLIKLPVIKLNPITIVREAAIIEWRVVRVPRRLMRSLSLRMLRESMSLEQLETAGRILGSTYEMATHYVGDKFKVSAQTMADCVLAAYLMHRPLMTEFRAMADVLNRNAGNQVSKYLLDMAQGATARISDLLGGTSRPEDLARMVGSIIQGPIGKILENYADEMANLHAQVLVQKPSYKLYFYGRVLNFTTVHDQPTNYGSEYPIYRVMQYVPAIIRATFKTPALNAPAPVPRPNLASLGTRLQPDTATGLQLFSNGVINWDELVSGVIDIAGKDLTPDAAKATLEFEQALDTALNSIQQNAKMPTHLRIGARQAARKTTMEQSLEHLVNFTTNNSVSNAKNLIDSCNKGMITKYASEMTVGLLYIGSTGDMMATAHLILILVGLGFNVVCACPLAHLRGLVAIIDRVSVKAIAETMHDWDDDEEWNAAASDKIIIKTRGGRSVRLMGLEYDTTAAIHAAKVFTNMKFDEMKKLMQEKLVHCTMPLDRNVRKAFSTCDFIIGNAAAPQGRLLADGMARPYLQIAYLPFGLTFARADSLQRVLDLVVSTITPGFVIAAASGQLDREASQLYNLADWSRHAIDNPVLTHYCCPTTSFMSLNPQSEPNKGPILAGRFPWEAGSFEGPTGKVLFVTTGSMPGNDYSSIGDASMILQSYQYHTVVLHTKNEEDLGKLALSFTNKSLTKLPNDSSDLPDTLTVLSDGDWLFIAVTSLRLERCLKHTDILLSHCGHGTYNCAREVGAYMINDPQIMDQHLWANVAELNKFGVPWSGDRARLLPRVSSLLMNNVEPVMGESMEDKAQHLGAMIASTLSSNGIEVNPYYEDLYYDADADMADPWNSANPNAQPRDDSGWGQPYTEGQQQPEFQGWGPVPDSGIGNGTQAQPELPDHQTTVENTGEWYPPVAGGLILADKANMSLAECKDLRIKYDPMDAQQAAGTASCALWCLAKTLYDNFEPELEDVEDLFETEQDSVSAERDLQSVINNLTGLDVSEVAEGGLERMDIHLLFSIFGLNTYDANTKQLYCPFKTRPIVAIDTSQDHCKLVTCHIMQDDKPLQMYTKINQQPISENYIYLGDKKVMLKTDTIEFGRMCLGSSMWDLSDPNLRLELRRQVRNGRLRMRGHKLDDQAGEPKVLVFNALRYENCYLIEPLNGHRPMVGRLYGVPLVNGSVSLGCVVSNTQTGKYHLVVESEVEPIGQLLSIRTRLFATTAESRNSDNRLDLPITNSQSRNAVEKALKRPVVLLSGKVQPPEANVYLHNADNYVHHNQLSLYTQLRDCNVQTITGETIYVDDLRHKNPWTNVLVEGEFRLGLPTHTVPYDNSEAEPQRNAAALKWCDAVALEHANLNETLYLLGHDATSHAPAHEGPLSIITAIIRDDRGSRNSLLQVLFAARGTQLNDFIDRHPQLNWAKDMVAIKTDTAQIGPIVEYPFIADNSFIYMLTADGWYMLSVQKEVPYGPVSLVPSVSVPFLGNGEPGTVNCGTNVREILTAIDKQNTEASVGTRQIGPIYLSDVFNWLKSTMDRSKIFKVLGMDVLHLVSKMYADGVDAETCLMVMPATSDKNHDLRGKMLRLAGAEITECPSHPGNWCWMLDGKTVWLVSGQLAYMDCPGHVKASDGVPTRWNKKTVTLKYTQNDPKFCTYHGGSGANCESCNNVDVIALLHLQTMAEVLVKYNELVTTNERIGFEIPGLIVVHGKPIQADVVEQSIINSTASQAILNVLKNAFFPIHNKDVGYRALQHTDLDIADVSKWPNILYKGYVAAEIAQVWVEGSRLDINPDEITRYTLHKGETNRLTHNDRVVEVKGSLQALCGQIYKQFGTTDFYEFIYHNGQKGGQLHGADVATFIIFNAVAVIEYRSTMSFQDSAVPITILPEEWCVDYTGVVHLVHARTITVINNKPVLHFDIQGLCTAIGARLEYGDKEIVEMQVDTVVTLCKLRAATGNLFQVALPRTLPATYKEWSTGEGKLWLTPNSSLKQITEAEWTIRFPNGRLVATRVQAADYDIHYANWDCTRDYKITREGIRFANPACIVKPSTVKGFQSYRDTMNQFDWFTTDPFEAKPKLEDQPRDHQVGFKLQETKTTGRPMAGAICMPPGTGKTYLCNKYPSIFVDHDVLEQHVRQTKEFQEALAVRDWAAVNAIHRTMICPKGKVLLTWTPETVPYSCYRIGALALKEDPVDIGPDRANLAAMCKAGYDGYELLNDRVAVENRAVKLAEQYLDGKLDGISSLKTNFEDMLHFQIIDSLEAPELAVRYANTNIYNHTPFIPSLTSEITRAMYDREEPPIEVIDLFENRDLTQIITYKTPRTFVNKQLPTSFENPNLIVSVRKHTLTKYPIYSRPVLSKMIYSEIEATQLRFHDDVKFRKYKLDPAHEAAEFAKTYFHRDWQERVKAMSILTWNQDQLAAWLRARPASATLAQHMEEVAASLYDDSPVAKLNVHIKMEALLKSKPILVWDDQARRPIVWQDKFVPYLFAPMFLRAKDRLKQLLRPEFVYADGLTPAELSSRCRAVKNGCKFYEGDLEKQDSRTDIDTLDTSFYIYEHFLRIDPIALSLYRTGTGVWSYKGKFVKGISRYKVQSGMVTTALQNVINNLLVHRRLVQRMGKSIELFMVLGDDSLMLHNGHIDAEELRLEIKQYFNMLSKSDHFKAHGTFLQMLATETGSGVIQMGPDIIRLRRRFEVTNGVTADPVGTANMRALSYLMMLGDGKRQREIAAKLGYEEELPVWFNMDDNIRGLCQKHDMTEVEVENELHTLLDMLEHPTITEYHWEHYADGFSFKKNQGDPYIAKAGADHVPGSGRF

SEQ ID NO: 1345 - protein, 4741 aa, Ceratobasidium endornavirus H
LVVDEATGLTPTDLALVLTSNVEHLVLYGDPLQVGIVDMHNVHGHRVHYGCMNLSKNVHHHNMTYRIPILIGEEVRPMVPQLAYGHDRQGRIELKYSDSIDMELIFSAVREFKIQAIYVFYSTTANALTRALRGTDLQVVVNKVHSAQGSEFDRVMVIQGGGVKAGAGLHLDKNYCFSAVSRTRELILWWSIGCHDKARLRDRVMGITTDPRTFDRKAAKAALNYQMGAPGALTLAKEVMKAIENRHISTNYENPIPAKASPLLKYSLEKVHELLKQFLLGRKGGDIKYIHTDDSAVIQVQPQGEPSFQFNIHPLRGIEHFPDDYAGPNLNALQRVLKETVDTDRFLLINKYSIEQFSREGHENFTSLFINFCTDMMNALSMTVVDATASDTEGVRATAVTISNDEVITLFITGNQFDIVKTNEVEGGIEFEPLAVMESFVKYLEQLQAVLQDMNGSDMIASEDDRAMTRGTRHTLDPDAAIAAVRQRFSIDDSISTDITCTESGVVKRYNVTASKSILGWPVQMLAAVVELHTLSGQVEVTHFKAHPMVKGLGYSVDGRSFAALIATLTTARTVHLEVPPVSIPTLTVEDTEEPAIGPSLPAELFNQDTYTLLSMNPNRGTAGREEQPHPNVRPDSLVWAYHATRLATRDILSNVGEYISQTQMGPFQPLLGVEAVNLALRVWTKAFTTVLPIKKKVYNPNTQEETVWEWEITHAGDLSMFGLKKTTGMKVGICNDTEALAGPASVNGVECGCVEELEWKGVTRTGHSLTKVWLSRNTVRLIRTVSFYSSLQLGRPLTITLDGVTFLAKTGGGCTACAGLVVTALNGDILLTVRKQYVQFFRRDVTIGQSDLALFVAAAFGFDVRVKHITSNNPLSESVMPEQLQRIRELGRTKMYASEVCSYLGRADDEALVLADRLANFTMAIINRALDGDKATNLGRLMSRYAVDQQYLLKAIPDALNCLGLQTAEQDLANSHERFDNYVIECRGDSYSVFVIAGTTLNSGDNLLMYNPAKKPGNSFDLDAYGETRPTYNCKNYQELLCIAVQRQRDLISKYTPYFTDILEYYTSYGANYDLIPNLNISIKEHRSERTSVWDRVLEMAAKVQKTSKGGLRDLQYVPECFLESVNAHAPSMVRSLNMLAHNRPIISQSVDAGVEQLHNLYVRYTVGDQRVALVTAHPGNVILSGYWAWQVQPPKDLLQRDWYMAQVNLLPAMVQSIINTLSSHDDTNEKAGFLKQVLSNNLKPLINSSNSNNCDIVNLGLNLAGMSLRSVSDYMCGETTIVYGLLPRQSIPQSVATLSADGLSIMYAKSRIGYMIEPAMVAWARQGGSYFLPNGVHCHIAIKGELFFHSLVRITLTKTKLPNPEYYVNTHDANSNDAVHYTIPVINITAFRAREEGIFNNQQVRVPTKIQRLLSLRAARPNTNFHDMLQYLRTLRYTSYYSATGVFKRDKSWIKQAVLWALAVYLHEGDFTNRLKELTGMLPGTQLSGNTTVNVLVSRLQDTAIGLMADVVKSLNLDLSITEVADVAAKYAALLTSRGKEAQTLVTMMHNTSVQRLGSALQFMHHGETARPVMDRTLDPRLHIRQRVDEITRPTPAAGVISAQLEHSGTTMFDVRSHSNGIHVYTLSGTPNDREVVRLAVANLNEFVSMQKLVTPMEQRDLAKAALAIRTLEGTLNEIGTNIQHCKALVEGYNGPRVMLMVCSVFDIPSAYLAFKQGSTLIRVSGMRLDRTNLLSVLGLPGMASQYVGLAPTTVMALGWFQLDNTPDLSKFLSWLDEQRIVEFLPNWCAKHHGAKTAGWAPVETSVTRPGTADTYLYLKDGVDTTISQLNTAGISYTHHNPGTPALHATRHMLDIKSPGVTKVIIHSGGVGTIQMCIDNNMPMVIVPAFGDQQQNATVFEWATMENLLKLGLNEYGNMCKTEYLKWKVPAEKDESWAALTVLELHARMPRKYFRSLPDNQPAINELTDAYKAFIGAPPAHFASARDYLQSVLARHYAPRGVDQLDRVLSELRDIINRVSPTRTVIVPPTTSRRSIDRELVIRINPTSATLNVDKYNINFFCDVDEVPFYCSLLLNAGLPGHVVQWGVGIIQMISVFDSSTAVRNFTVSKGARGSTDISAFMHNPPPNSLSELSVYVSVSTDARLMGGIALFHHVGPEEAAVYMNSRGRAMWHTNQGGYWRVDYPRCPVITVGGRPSTLDLRASRGRTGPASGDDDDDEHPEPGFDDKGGGPSGADDGDDSDSDRSVYEDAESTPRTGASTHTMGAGGDGDHEQIEPENNLTVWEKFKLHFDKSSESLSGKPAPVGDIRNTTPTDVVATAPIPQITVAEPPIFLAPMIVDALEGNNEEALRGLPGSASEIFETTPPSSPRFSWQLGSSLRQWDLHHRVPAIVDGNLYDYGANGLRLWDATGHQNGMLREVTRLLSASTLREHSSKFNQGSLMTTILIHISFMAQWCNLTTIAGLSGAKAYSLAIDSTMSTLEEYGINGLVDDTIFDDAIDAIVEGYIWDDVTRPVRNYTHKEVTLELVTRAIIHRYTSIQHAREVRASIQEHHESMAVSRIRVWEIEGSPQWVAFNKLVNHPVTLTVGAAAEEIYGFEEVLGEFVDSLFDHFTGPFEHRYNRKRLLTHRLESYINESPKDPNMVENLSNKTAAWMNTWTRHGYLPIHAADDECPEGSIAIPGWAISDVDEIVAVLKNAIDNSVGRVSFKVKQQFGMIGTIDIQMPPRETEGLQLWMKLGAPVLEGRGALTHEEFIAVARSLGNNGPVGHGTNAAVDLSLSNWCDDSKWCGRGHRPQQPALTGMATEGADDEVVFSHEMEARGNSKYTLNDYGIELGAGVWSVKERDRYYNMNIIERAWSDSKNFIRDLVLRGECTSESTTEDAGTPVGLIVRDGSRNVFVYREDAPMRWVIHKPQHPLLKHHSTCVTVNAPLGSPSADEAHRMPVLTGTEATYLNEAHVPTQRRSVQLSVHRAHAGIDPVWPYLGDRITSQFAEAVEVVASKGKATSPQSLYNMAIERGAAALEMAPTALHIHLSEQEGWPMHDEQADNAPSNTLSQRFYDWISELKKSVDDSSAGSAGMAASLQQRAFGQPMTAGDPNPGGPNLGTASFKGLASRNPSFARSLIQMAVATHGTWVLDTLPSSLEHLAHEPIGTLPATAPAQGGTTHPGQPSGSPQPIKHTRGRRHGNERSKRSNAHSGRHKRAQVAPPAAKQAREVGRRVAVYSTSRSQKVGTLHLEHYKRDAVATSEKCRDEQRSEAMHELRDAFNSMNYSTAKLASSILTGKGMIDDDGWGALEAAYSGQSWAAPMVYAAGLAMEIKWSWNKLNRYARNWVKKMKKPAEAAATIAPPPMAPPSPPKPGPGGKGAHTGSAPGTSAESELVSDTSTKRERVFEFREKVFDSQTSDAACVEILEEYLRGTDVNIGELTESEVEQVPDFMPGEESVPRKSQLRRLKKAHYALQSLHYRAKKEYNFNRFRSLVEMMDGGVPKQERTRRVTFVTNEESDEEATIPSQGQYSEIECYATYNVVYNPPTPEGCVTACFKHFGYDVEYQRNHTLEQIYMLCYAMGINLHYHNGTTATMVNMGRVKTVQFLLTDGHCACIELQKHSRPVTHDLQTNASCLPATTCKLVPSPSVMIRDRKEGMCTGHTHHNVVAELDYMLRVTENKPLPLLTKANDMSSIRASSAGRNLGLIAARLNRPAYYTRLHPRADGYLAEHELPPYRLVFVLDGGLVPGMTLPTGPTKFVNIYTGRRPQGSPSRVVIDAGTTWKVLKMPHATVISSPVDRYLSRECAEHYKPTEGQKAMAPGPTAKLYVWSYDNRRHHLYDLRGYFNSMPAEMLILPPSITTEQLQLIRDPPDGRRYCIHDGAFALSVDFLDMKPKQLTKWINRKTSIGARNVKVVGNSIIIKGAQPSLDIISNSLAHMFPNMDNGRLTRAFRDGETLTRDECKQVWGDEYDASIDWPEDTCLVQLTMDISQFGAETVDGHRWSMIEGARPVFRTRGASSFVQGIQMAGDVRNDQKVENTPSVQSTFFSDHGKTRMGDIWATSMARKTPAGIVYLASGGGKSWLKNNDPDTFTDADDMVKMPAITNWEAYTQGHWTARNEEVRRQMMQNAPLAAGKILLVWHPDCVPAQWRGIKSLYIIIDDTEGERLFTIGNESLKALVARKPNLPHVVCKREENGKHLHTYFDLANKRLQPVNAMLMVHMQDVNSYSFESTYINPGAKPLIPFLNANSVNVNMLTGVQPMEDEVTVEAINMFEIGDLSDWVERKGPTDDMVIKSTEKPGQVGETSKNTLVRYPVWSRPVFTKVVHSTFNAVSTRHGTVEHLIKYQLDPKKEVDTFTKAWFRTGWQEACEKMRQTPVSFNPQATKQWINERPDGVKVTNDLMQILEEGISSNPINAWKVHPKLESLLKDEPINSPPEQKVRIIVWQRYGYAAIFSPIFIELKKRLKSLLAPHVLYTDGYTPADXPRAVKGFSRFFESDASKQDRQVTHELSEIEYLLYEMMGMDPQALRMWKHAEVNWDAKSQGMRTQLDARMMTGSSATAIKNVITNLIIHGDMYLKNKDHIMLVLVLGDDNLMLVDTVLNLEGYRKKAAEYYNMHMTPKSNDNFGTFCQMIAYKTAEGTAEMGPDFIRLARRFEVTNGVSEASDENMTARSMSYAMWLGAIPEVEQLVVEKNWPIKPLAWYDPMRCAHAVAEKHDMTVPHVLNRLNKLIEMMGDPKPHTWTWQHWTPLK

SEQ ID NO: 1346 - protein, 3858 aa, Chalara endornavirus CeEV1
MMMRGGDMEVDQTAAAYHGMLTTKINFKLKKKTGLNRSIRDLPIVGNASKKAEAEIANNNLRVKKWIDHEYHGRPSALIEHLTKIQPHPTVSTTPDARRGHILIRCACCGAYTAYGINKPMSARPGGGRMMRGRMRGPMRGPAASTPAAPPTPITAKQIATAPSVSWLYQGLVMSMLMTTNDGTEGLIPLACFNCGHSYLDELMRYVHILQGVEPTVHTTIRGTLLEYFLKANQLQGAPPEAFTKSTQLYNDIANRKVNAMLSKLNPTHLNFIFALSEETVSSTLSHRAYLSHNAKATMLQNEMNALEVEELSLFADLVDTLGKQIIVNPSSQVTLASMIDVTPVGFASSWFSHINLSYQSKLSPPPDAKQILIATDGVNLSDVITNGHMLLVPRTTLLSHNDGISANSVFTEVTSCDIPVAWDKKAITILNNAASFSIGGNWYDAHTVACTNNLQILTFTQCDRPTGLRSMLNDPNVEVKIPIIDITNPLSTLGVIGTTWEYRKVNIDLTRRLITFAISGEKSISAIGAYMAGLVSTRYVVGNRSVDLTRFGISDGVPELTMACLLLMNRKVLSTWDATLLNNNMDITKGSKQLVNYLGSRLLELLVNLDNPISQHVKSYLENGTIFEARIADLARELNFTDMLLNNTPYTIISGANTVDVITSGSVAISGCVHHKSTCSHDTTGKRQCVCCGMTILMGTLCSCCKGNHTCNHKCNHKCSGASAHICTICASGNHCLNRSVCECCGVESCAPCRVCKSELEFSTFTMVPNTRLEETKKHTNKQSELAKELVGPSRTQVDLISSTTRRSELHTSGNKVSIPLKSTSGGTPETFETAKSASVNWKSIVVYNESDVFIPTLSVKGDFAASFKHMGKEHVADIINVENYCGLKAIATATGTDYNSLKYQYPELSMSSADDLKRVVKATQLNCIIIVNASSGYICRHSTMNDNYGVIALTDAIPELQQSGHWIVTHFPGLDGQPNGFYYPMDFGYPFKSLDNYNITQHSDAENVDLRAQLVRASVRAQQIGATTITPTVQMINRSTYLSNGDSHNIVDGHIHIELKPHQATILAHLEDKIPDTAWLGESAFYEDKWDDLEQAVNSALKLTVMELIRCSSNLRSNYKPDVGGAVQLVRTVNATTLSDPSLKTLDVVCYCSHGKWYNTTVTKTPNGATVQIADASISEVYPTKVSIASLWRRICGLLKAYNNLGNSASCKFVTAVDGIAGSGKTTMIQALPGLQNATIIAKTRAALSGLSSTPCHKLMSLESASYTKINSPTIVVEEAGMVLPTELLSVLDQPNMRIHLFGDSQQIGLVDMHTTPGLRGFESILQRFKTETLTKTFRFGNPLARDWISKFYPTIETVETNQTTYGYSRLDSIEETVSVAINSKVDAIYCFLSHTQRVIQDELAARSVDIPVFKVHSGQGAEFDKVLVAHIGGGASHSGVMYQKSYVVTAMTRARKHLIWVTGNNGPPSMQSLQRLLLSGRGAWVDVAVNADNLSLTRQLSQLEVIGWNAALNSAVFSSTGGWNATVQPDCIFITQQTAVGLIKFHINMQGLHCDNLLTSLAKPMIQHKIKKALSQWNVTESADLVSEVPIKTLEMPGAFPNERNLRNDIMITKSQFSLHTLAKLYTLGNICLAGWTTRTPIELNISGTKVLVKHFNGCSLYCGFKFESGGQTCLISSAHDEKCKDSLLFMLTPHIRAVSGDKGLMVKIMPWLESDDWAGVNTSLLLGAYKERVANLWTSIGDGCSTDKAGFTYASTNKITLQSLADYSEVWQTPTHQQVTKPLLKSGDGYRCAATGVQLSTFRALTMHYAGVGANEDLELSRANMGVADRILESRYKAMLSGVQPITLPSNTFNYHKLAVENHLGANHITVAPRTALSAHSSNIAKMAIVSILNTILNKPLITIAPMDVVTFVLNYRKGMRLYAPILNVIEREVVTKFARQKFEQLSAALERSNKPEERQAIKDQADWFRDINNLTTNSTEGLVLTDPRYQHLFIGEVLVVQPFAMSADTVLDVDNGTWSHLGPMEPATPYQNTDGIALMHIMNYKVCVTPPRHAHVRLYRDMETMRHQRRFAATRGHLRTSTMPDYIYKKMMARFFADFSTTVNDLVAYGRSLQQTVTYSSIGVHARSLDDPTQILDYAIIVHNIGKRQVKTLQLLDSLSTPKTQMNPEVLSNTFKVLWGAFGSSIVKLLQSRPEVELLNELAKLAVSEGVGKKLYDLASDVEIYEMQPKKWLVHMSTPEPDDLTGDSTNTSDAHDGEDESNQQLQPTGYAPTKADPNMAPTSESDTDKDPKTTHDRSDESTYESTKESFDWANEVEEHMEQAEMRNATAKPVSNVARWTPPAHWEKASREPAWSVVAKSKRVEIPDNKPTHISHANKFELLGEIGRPESTAQQPPPQKTQPPVLTTLSQTTKGLSREEVLKLEAMVDIPAAFGNNQPTDVCLVYTGSTGDSQPLNAIAAVAHACGLTTTALAPADVSLPDTITVPLIYTDTYNHFTDSQVQKTWISWHHIVKHSLDVLKKWRTQDRKHKYVVSLFFNGFSSLVRGTIDNIKLIPQLDQNWDGFASRTWHNDNLLTLLGGTRELQFQLHFCIPAGMSTTTNNLGFAMSKSDFTLSRTDVDDIACLRFIIANKHRRVVLITYGSMRPTDLSDRVRKQISEHDGHPIILVCDKLPETELQQFCRAGDVLVVPRCKHKLIFPLVSKVVCHGGAGTMLTAMLAGVDMVLDPCAFDQFHNKSTMAQLSHNIVNDLEHEYFHFQQNASEMLCGGNVGAEVVTTRTPTKVTAMLDREPDKLVSVQNKMVVSVESVPNTYVGNCVMACIGDCISNATVLACVAENFESRPINTAEDVVLLLAVSGVSGTVIHQDRAWCVECCVEDEEGMIRCDLWLNNGLTHCELIKQCELKVTAPSPTLIRPDLVFSALGKEPMHMLVLLLNHQWSKLGYSTTEFDTAEISPAMVMDCLHSSFSLLTIESSRIPGGYQVPSSLEVGVLYLCIGDQGSCFGLCVDAGISTSGEIGTVIITSSNIGDHIALVSEVGETKLHQLSHACVLDLYTNIDVKSQLHERALTESSFISDDDSVTSRTVEALDISPTHYTLITDDIIAQLDAGAPIERVPEGDQKTRGFILASHAIGVSEFTRIDSEIFAKLPDVVGKPQDILLAIRGDEIKQLHGRKATASLSVVTDLLTLQQVRWVHDYPISDYVRIRNISELSNFLITRAGATRDHINTWMDTNQWTVMDELNSTDITPQDGVPSIALVNGYHMEGDKCWVPLLDRIFTVVKEGHGFAPTSQQTSVQLEDSRFMAHKFNETHDATDTVGVVKEILNVSAMIPSFSDSQQAPYAGEPFFLSQHEASNQVIEVVDIMDNNGSVEVMKVDDLPSAKTMDYWDNTELIDPVIILPSNPDFKITSRIQPIRTKMSRYVKMEEWPEVARQSRSKAFGEELNSVSKRYGGYIDYQTTPLNIEDEVSAFVKNYFVPQFSSLSTMWMSNPVQVSPAGVNNWIQAHSSKDMVLKSLNKLLEDGWGKTGINSLEVHGKTEQTTKMDEISRWYDDVTTRSIVAAPYAISAIFSQAFMEIKSRFKLALLPKVCYVDGMTPPEIAAKVRSTGGFKWAVEDDLSKQDRQTSWDILKIEQRLYHLLGMDTELVDFYMQCHKAWKWKGHGISGVWDAMRLTGQVTTALGNAITNLVVHNRFYKRNAHSVKLMMILGDDNIILCDNMLDVRHHGTEVKEFYNMVSKVKQNERVGGFLSMLVYDIDGDVGLCPHFSRMRHRYSLCNYTYSPREMSDKVQMRTLSYAFTLGGISEVQAIAKRINPGVTLPNWYHLQAAIAANTIYDNTSEWATRAKLGKLIEMMQ

SEQ ID NO: 1347 - protein, 4981 aa, chieh-qua endornavirus
METSPIMSCIPSTLIDVSRERPPFWRSLLKKLKLKSKYHNYKSINRVVKPSIVRREFSTKLQGWIKLPRNCQMTLNKNPFETSFRKVFKENKNLIFDKNKIKLVPAIRGVRKFRDTGGSIAANFRFEDPLAGVINFEALHPLDIAKVYYNVINDGCEIWKQPHRPISDYLNLTKHEGIDDEDEEEEMFLDSNNLDNNLIIRVVGPGRGNCTSDMLEVLSKLVARFGGYEKYYNTYLETQHKHFGYLQRGDDGKYSFEGVKFNPLKKCSVCKYMNHYDELIRGLRMVHFSLKHYRPKSKVVTDDFKTIYNKGDIIEDVPWRCGYCFADLNLQVHTQDDPLQTIVQYVVDHLFVLMGDLDQLLKMGYGDIYDDIDIASKERIKSTDIARANEYFYHLQRKIIPVGQDFDMSQAKTITDSIGGCFFKMQSKLNSVKPEFIAELSALTEIIEKSCSSKPVASIGQILPGSSKENVHNWMHNSTWYQPDPGVNCSNDKICGHKHNYIIYGGPGIYALGLSNVLALVDEQRSLQIITPIKTNQNVMADGTGAFQRTDEYLNFYIDGNSTPLRMKLDTYSIINDYQVLKLDSKLYYVLESHRLKLTKVMTIVGPFKESVPYPQKLIKHDTGIKVTLHLPDIQSFMGEFTGLNYVEQEFELNVSLFKYLCLRNTTGKVSHDTLRSYAVGFSLRRFVVHSKVISNPTIVYQDIDIHVILSRVCMMKLRNCFDISYGYSKFAKLLGPFRCWLGDVETAMTSSFLGLINKLITDALGLEWDVVLKFIDEIRLQTMVDGISSTNFWEKLLSLAENITTEDVKIVDLDQGVSVFVGPNIGSCNHHGDKCHHIDTKGPNRCLCCNMPITEYEFCECCTPSKLFPGNFFDIEDRIKKEETEGMQLTKRNPTSERVMKLLIGEIEKLSATKTEEVKRRYQTATEKIKSGLHTVVEKVRKTVVKEEGPSSAQEVGVEQEDEVASSIEIPSNAEGWQRVTRRNPRDPQSASDRMVTDMLDQLQPITISADSAEAIQILGYDFVQHCLNTVEYENKLNDGTKTLYTLPHIPIGDIITQNQSFEIVSKITIPNSDAMTCAFDAYKYGYPTANLEEMIALNGGPPPLDNHVIMDYASARSENIIIFGSTGSVWMARHSLTSNDFHCIWFDEPELDGIGHFMPAIIRRIGTQPTCFVHTLPASRDERTQLITLQYGREWSITNPPPNFDGKENLLIELTFYNLHTDVSTNTSTNLLQVVKSGEEVILTNNKESRVHATNRERIHVSLPSFLTKYADSLSLALKFDLTNEAIDPMRHISDELPSNYDYEVEEEFKEILRTFIRVRNLKAGLDARDIKFAYKGKLTSWYGKSKFLMPTSESHKLKRYDAVAIKLDNKIELAYVLGLEGNNVILDKTMITAREVTMYEIKESTGSKLRLLVGLCQPRLNMQQLKDKLAKAQYVTGPAGFGKSTMIANEAKKGDLCVAMTSTAVLSLRDKCKPDVTVISLERAIYDHCKTNNTLFIDEATMVNWIHLGYLCGPDGNIKLYGADHQIGKKDMSATPGVRYNITIKSFLSPKNIKRETHSYRIGEPMIQLLQPVEPGMTTRAKHKTTYNITTLDDCEFENIKTIVTRLNPDIIITPYSHNRNKIQSNLGTLPNKVVTTHSFQGMEVNTALVVLRDDSNRARELNGNPEYLNSALTRAKYHTELVIYGNYGTITDLTPLVRRLGGMRIPTLPTTKIKVSASKQSTELEIDQTTGLPKTINIRSMHLLTSDMVDTLNTMGINNSGVALTYEKVERGTRVTAKLGNSVVSTVTNKEGEIDVQANAFIKRKIMNNLDTNIEIPSTPELDKLTFTDEKMVTVNFRLTNKLRELAWIIDKGTENNMQFKIGKHIIKITKDSGCPLFSGATFECDEEKLRISNGWYSLFDRKVFFDSKTTYVKLSPILTWLDLQVPELFYKTSSDIDWLDVLKGDMVHALWQFQERLTQIHLWFLNYLTGDPSPKCYFNNVKNVARYNKLMRSMGSEPITSHQSVVYHENFIMKSVTRWRRATKYTLGSADQIIAEVSTRDAGCVWRMFAVESLADMRHSYPKCKGIGGTDFDIPGLLIPLHKHMAKNTAVHQLVSSNLAKLKEQIQPHMHDLIRMDKQGLKLIGNYMSQKYPKMTLTTGSYELINSPIEIAMEQIMLNMMGSLTKDTPRLVAYSGYVPLTVAMLGKYYIKLVIPELEEYGRFYYDISKPQLDSMIAHFNSIRDKKVDFYTSRTTNLERLLMGTRLTSLSPKEVDIALNNCKTVYGWLPMFKKSTDNYGFDHKSNLIYFKHGKVSNPINSSMLDGSLSGKPIIVNNKDNYYLEMSTMTEAFDHRLVQITRKEIPIERYIDRRIGSYSEMNNIIKIKVPWIDLDLLRVMSDRQIVTIKELTINKKLLRNILLRLMTGEDSHDDALSYARTLESTQVITEGGIDDMSSTNMLTTLNTTWYAIYIHNDYLKKFKMLISALNSTRGHPLAVGLLEQLITGFSKFLGMIGEVAQGLCETLITKLNKDFNLTNRMADCIDEAQKTNWMPDVKNVYFNRFYFTKEGSNDVTSWFESKPDDKPDDDKRKPYQQDDASEEENSYFNTQKLSRFRQILATDKPRTFSHPQLDESVLQEKAEEEGDLTDYEDVEVTEPTSLPEVSDDDEEQTEIYCEISIENLLLMEQEIPTIHQRRELQRNIRKLSAHKRLNQDEIGKIICKTKELINIGQTPEHVLAGDLVDMGILTEKEKNTKKHKVIDHDAITVPIHTGITKPKLKSIFNKWHMIPKIIWTYWHSNTMSKLVGQCVKSVQVANPDYEVILLTEENLSRFMDVSEMNNIKHLKHENRADWIRLQVLITYGGVWVDATSIGIDNFDELLEMTALSASGVTQVSFSEKDEFVKLFENWMIISTPQNPLLHMWLSHLKTLLRLNFKHLDALDEYMNDNYERYDKYKKRLGPESRLYLLSYLIEMVIIGMTRMEPNAILADDRLVDVHHEVKWQEWNQIPSIYFFKNERQFKVPIIKIISTHKHIIEYCRSIGFAAHKDSWMYQLERMGHSPIIVDHEGYVECLHDLVEKFYPTIGGSRQGIRPRADLQVAIQNKLIKVVDNYTEISLNPGLEEIISIIFSCGLTFVKPRKEFQKCLRVLTEKLTNETFGLTTVVDIVQDVFKITLREFFRPLINNMVPINRTMQSPPNTEYIVVGDKRMPKIIWSYWDETIVNRFQVDMIDNWHYHNQDYRIIILNKTILSRQLSKQTYELIMAQTPQYRSDWVRLHILSKLGGVWVDSTGIFQDTIHPLVMQTLQHESGVYQVSIQSRTKSPRYYESWFIIASERNVFMNHWFENFKNMTNHVKPSGSNALDWMEKNFGQYYHDAKNLIVPNLRVYLRVCLVGAITSLQLKIEPLSLCVNEGRLTMFHDLPKSKWLNLWGLLTEEPAVECNVTFPFIKWIGMQRNIIFRKYKPDFIPKPDSLLGQQMFKITIPYDVTNSGGLSYPGEAVKREREPRITISQYHQANILILCIGSAGDIIQFLTIYDLLESIGKCPVIVTHNDHDNLVQNRRHHFLNVTAKSIMETIDSKLTRIEIGADIKSYQQMQEITKELDVLTTNYRNNIQFLIINSAIPNLSCFSEEVGHKIIEISTFPTEWMFGDTTSEDTPGIGLKLKKWVFKNLNDRKIMIKEPRRYTYYNSCSQLLYPEGENFIGPLTIWSHKVNSDQINLKDNEIFITFGSCDKAISEESKLHLFKNLVSIGYKLLYHDPYRIYVVGTKFFNEVNEMRGKIRVIESFDLRKITGNDKTMINHGGHGTVIESLLAGFKLIIHPVIADQFHWAKRLKELKLATMLTDIESLENCKDAVTELNRLVDFNEKLGAFLTINTIPFLNQIDKKYLAYNPGHSLKALGSICFVEQKLKLVRGVYRISKVMYSVKFNPQVADHCVLESTLYQLSPYGLEEFYRFNNLSANKLKEPAVTEQDLINGVLSLGINLAIIYNNGTGIVYRIFPGEYLIYHIDRSRIPWHVGVPEVAGYEMGDQIDNLAPPVKNLPEDVKTERDKLLLDHTTIELTNPRVLALKMGKKYFKNLMARMQGFNLCEMGNRSDIHCLKLDLRRHGFTHVGDCKGPDHPLTVGCITSNQGWMLVNWQVKNNQIIIYGEQGIYSTSILVNLHMQMQLKSDVKTILQPRLELVSLNKATKQHTIMNNLVPRSSVIYNSHMKTYKLVVSDYDNRDHHMFDELTVIQGATEVYFHSNRRVTVKEFEESHNKGLNRLVLRQGLLGYEHYFDDVYRGRLILNVAPTQHEDKGKFHTDLKLTKDKMEFVNYYFYAERGIMFARDDWRINGIEILESRRVTDIINTSVILTEGEKLNLNAVISKHRTWEVARMTDMEFKITPITHIFVDPTGVIHLQSYMTLLRPPKQGGNDNLERQWWKMTHEKPNLSKPVPGDWWGLREKSIVKPVNKFLDVMAMNELHYHDPTTLNLNLQVVDEEPTPMDIYIAPYEAVYPGSLLEPLTDFPDNIAMQLWEDTDLTNWLSLYAPLNSCVIKSRELPGQIIKSEKLTMNKYPIRSRAVLTKVCFEEGRSIIGRMKSVAFIRTKTPNPYRLVLNIADTYFRRDWQQLISNFRNDLLIIRPKDVQKWVSENKDSQRIEKELIELLCGELISKPINDVNVHLKLESLLKENTTIMTIQQQARIIVWQRKAVCAIYSNLFVEVKRRLKEILHRKIVYADGLRPDELSARVRLAKNVVGFFENDLTKQDRQTDKPIIEVEMMLYDLLGVHPNVIASWKEMHEVWRFKSNLYWGEGEGMRLTGQATTALGNCITNLQVHQQFTHNNFSILQLGLFLGDDMCMVFSEKPDTTNLRKDIATEFNMQSKDSWMINGATFCSMVMCRTLSGAELAPDVVRLKFRYEVPNGVHEATANNLLMRKASYLMMLGKGPHVNDTIKALNLPIKPISWYNFDSMVTAVGHKYNMSDDQVRGYYDELIRMIRSDQVYSHVFRHFSNK

SEQ ID NO: 1348 - protein, 4207 aa, Cluster bean endornavirus 1
MVVCCTPIQFVFDDPLLSSALQPDFIATWWLAKEQGMQNYGLTPEQFKPFVDTAGLSVEDPANNLTHKYYYEHKKDGVECVSVDEGGQLGLMESALNKIIAKYGGLKGMQHKCMLASWTKVPVLAKLNNKIVPFCVDNETIGHRLCCNCHTMNLYWMPGENGLDDAWCGCCGADLNYMMVTEAPTPGEKSNDTGEHINNGMGADQLEQLQQLKYLDGAELDGKVREKAIEHDARIMRSMISRTTGTVIKLEPGMTESQTGVLKSTFNQYVIVVGQGPPNPHAMLANERRCIFRLLLDLSGTNRPHVDIGGARLGPTTDQYRCMAPIMGWRDVERASAKVVQGDDCCHRLANCYCDVDKQPSLISVDSLYDIDPLELKEYMLRSGSDTIFYCLSTASVPEDANNGDFLFEQGKWSVHESKLISCYHGENLPYVNDYRTSMMWTHSDVIVMGEYSFGCSTIETVGNHVIRMARLTRNGPKSLGYTKRVVEYDVVKSIDVPVINSESLKNILSPSLLTKRTIKVDARLLKMLIVRDLTNSCTYEDMVTYAIGIAHSKYQLASRMISNNYITADMALDHALLATIISRRATSYTNRLIRQTQLVNQPMHTIRTSSWSDLWQILFGCFVDQAIMGIDEAQNRVHGQVMSKVMHLIEEWMHSVNWDDLLNFSLQFGWKDLKVVTCKESYSEPDSVQTCTHHSQNCLHDEINGNKLCACCLLIRVAMGESKCECCKPSRCTHACSHLCDGLDTHHTSKGGKTKVCECCKVEHFGSKCGVCQEFVHEKTVNIPVIIEHSTRDQPRKEWSEKRYVKAKLVPDAVKLLPGKTDKQEVTPLVDINKMIEQTMQERNATPMPSSKATVEMLAALTSAVHANLFSEDNPWVLTEPGDSHITGFPGWSEIKFVGMGMTVMDKSDFEVVEVTKASGEGLLCGRNCLQILLGTVDNDALQRLSGVKNNYSNLDLMNYLTMLNKNCCILMENSAVVNRVDVGSDEFACIVHSSWFGNEIGHWDVCNIRHKSCLSYVPLFYPWMTSQDVLTAIDVNVYGGTDIHNLDAQSRLEIACMIYESYVGANSKYGLKISAPRVDKVGNEYLITNNNKNLHEPGKYLFTFKVPEEYVALITESLKPTMSIKASKLFRDAFDRKRPTNALEMKSLMDDWLKQRLRNISSSLLSMQGEEGVDRQENEVLVKVYRHNGVNYVDRIGQLAKLKTSDVCLITSGNVKEWCVMEMAGNKLIMHCNRVFKSGAKIHLVVPKISVCSEIMGLMALFSGQLQWEKLISLLKNGSCVLGPAGSGKTERLLQMAGSKVTILTKTFSAREEIKSRLQVKTPVLSMEKATIKKVDSEIVLIDEATMVSIEELALAITDRVQKLYLFGDEFQVGMIDTDQHHGVREVFSVASMVDNVERLEVTYRFGEDVCKVLRNLGQKVTSASKHNTIIELVDMPDIDIERLNSIRKRVNPDVVLCFYTRTKQILEGRMGATPVFKVHEFQSKSANAVMVVQHNPASKSGGIWQDPKYCISAVTRCKTKLIWVSVDMPPGKPLHVRCGGMGPVGNTGGLQQVLSTMFRRSSASLSRHNGDEPFVVESAKQHGAEGRRSWAEMVEEDDQGADIHQLLQGGGDHVDLISGAFSYDAQMANYNERPFIITSQSNVMKLIKRYLDEGTSTYKCGGVKIWSNCKSHPISISAVLIRGDTVVVLSDEAKAIINKVIDELGVPRTMKAFQSHGNKNTFKEHVSKTIALAASQRKQERTLIKLITDEIVNCEESIKLKKVQLPVGWNISSMESRIQRELPPGLTTKTNGNEIIVRGMFGIKQWTLRVEDGELKWSDADIAMMLWKYRPELIMELMMYRLASSIDHIANSIMTAEDLNQAEKSVDLLQEHPTFERALVLHDDDPRKLQIALTMDAIHQGCLLPGSINVTDWLIPVREEFDDAYFDVHVTDRMEETVISIIRPGCNLATIYTNFLRNAVYVAGGLIKQKLIASFKCRTLQLWEDVIKQNQFDVVFNEDLMSGLEYLKWKERTVDMAMPTLNQTLMQDDHSVLKLPKSINLTNESRPYDFNKQHTEKPRAPIDITTDNCLCGSKLGIKISDVDLNVWKLSQCSGLALMRIPKVALLVQHVRIGGGVFEWNTPYGMVALTTFGGCALCCGVIVEFNGEVVLVMDRLQCTKPRHYVIRKEFLEVDSMLADCLLHRFSLIEPNCVNFQATNIRQMSHAMLYLPDPVDSLTLVSMVTERLNAIGRYTYKRFRHLEWRHTAGVFKKDNEVTIHLLQSKLGDEYKLVDNVKIDRCMRLWPSPVRFQHRSGALVNVCYTGSEWWTDDLVLANKFGITPMSYTELIDRSFDERLKSHGYNHLLEFNSRKQPMGANEILNYSLDYHKANKTKVSAILSEKMEAALSAQLKTLGKTIFVSEKQYAEYGALLKADLPNCSVSTHGTWVASGGFDQLVEMVGIKYSYMKFPDGEPILYLGDHPENVLISSSWAMHTDFLTSHNNVYHLGISSCNQIMDKLWHIYSKAAERASQDPTYEMSSTDLKVWHNAQKYKQTGSCQWVNSSLERTKVKARVLWMGMSWMTLSTQQIGEEIKRRGASTCCLLLPSQDHSGMYPFNINKFGNSWMAAYKGNNWPIDINQDTWNVISTKPIYRFGDARMVVHHEGMVLGHVKVRLTVLPDQLRGPDYQCRMQSLMANQKVVFSIPNIGAKRELGRKQQTRLIEVDQNFYRYLSLKVKLPGCKFSDLLPYARTYIQTTLYTHLGVNDRLNNLVSYCHEVCACVYLEHIGKTNDVYETMRQMEKFWGLQSADYKEWSKAYLWSKISEFASLIDPVGILSQLFNTNKIREAEELFFEALKEIRQFSAHRVYPEFKITKITCEPGHSDGDGANDPPQGDDGPPADDSKSRRQFGDAGAKASEFTEYYNTIMEVTKMITDYFGNTSSTVDDVGENIASDDNYQPVAGSNESLLSANDDVNETVLDNELELPIAESIREEEELQLPQHDDSEGVLRKIDAHTIKHSVFVSPSDSYDKPIDEVNQAGLLTGDAAKSIENLNMTIHTQQAFTEDKQLTQSEQNSASVIVSLIDECLGAASTIVPLRYGDGMLQLDDTYEVPTDKIQYKKYYAYDAKHVTEFNPSAQGDCVMLCLEHWAGANNKQIRGTSVVPTRNWLNEDQVVMIALFNNVNVSITYKRKTVLHKFSDKWDTVNIHHVVLRNRLHHCELIKFLNVNYEQATSGQYRLTGKNVNDIVNLLKSCGDANDLPVDKVMNHLSCIATGTLRSMDWFINHINEADGWGGLTSILELSNQLTAAKRKQVPMLTCDVQVGENVVALRMDDRTIAVGDCLALSNGTSWYMSCVLCHQRNWLICSNPAPAERNWLPVCVHMQYKWLSQRTQNRVIVHPGIDLNKCTCLNNDTKRMVAQWSTCPPNMSVGRTGAENLLIGHYDNISHHKYDDRHILEKYDPSQWVGVGFGFDSNLVSALLDRSTYYRTCIVGGSVRVAIKFEEVRLGSIVKHWVTSMMAECVRVGNEIRMSKTEWLRVKPKVCVAIEKCMQVDGQIVTCKKIKDCDFHCSNMEEFSSVVGMEVTDNSMKLLEQLFPATVQWRSVKSVIDVPDVNRHITNSVVRLGHNRFYLSDSLSTITIMKTMKGGSWVDVTETTTYNEDDRWWGTATGVVDKESQVRAILGNLVVEPLSDAEVHTLTHPVQCGTDVERALISWADEIDWDSSYVPGNVYTGVTPSEVIDLWTVHDMSGYITKYAPTSEMSIVCKTVVAKLMTTTKVTLSQYPEHARPVFTKKENQEFNAISGRLGKEVVYRTEKLDPIQEANHIANTFFRPDWKQLSLGFRANQVTYSTEDTIQWLKTRPDACKITQELMQILQEGLVTHPMNKMKVHLKLESLLKDEPVTDHRQTKARILVWQMKGLCAIFSPVFKEAKQRLKSVLGVKTLYADGLRPDQLASRVAQVPTTSYLIENDMQQQDRQTDETLLNIEMQLYLILGVDQALVGLWRSCHDNWYFRGKSCSGYKHAMRLTGQATTALGNAITNLAVHWRICQSLGRDWKWFCVLGDDGILMSDRKLDAEDLKTYGKKYCNMILKPKVSKNSATFCCFTIYRTRRGNFALGPDPIRLKRRFEVTNGVSQMTKQNVEARTMSYCMMLGDIKETSNVINKLSLPIKPVKWYDVQECFKASDEKHGEYMGCSEDCVSQLCNMMINPVLYEYTMTHWSESQ

SEQ ID NO: 1349 - protein, 4967 aa, Cucumber endornavirus 1
MKYKDYKPIRKVVKPSVVKREFSTKLQGWIKLPRNCGMSLNKNPFQSSFRKVFKQNKSLIFDKNKIKLVPAIRGVRKFRDTCGAVASNIRFEDPLAGVVNFEAMHPLDIARIYYNVINGGCELWKPPHKPISDYLNHTKHEGIDDEEDEEEMFLDSNNLDDNLIVKIVGPGRGNCTTEMLEVLNKLVARFGGYESYYNVYLETQHKHFGYLEKDDEGKFSFVNAKFNPLKKCSVCKYMNHYEEMIRGLRMVHYSLKHYKPRSKVVTDEFLTIYNEGDIIEDVPWRCGYCFSDLNLKISMREDPLQQLIKIVTSQLFVLMGDIEQLLKMGYGDLYDDLDVSSKEKLKSADQVIVNEYFYHLQRKIIPVGQDFEAAQGKNITDVLGGCFFKPQSKLNSVKPEFIAELSTLTELIEKSFADKQVASVGQILPGNSKDNVHNWMHNSTWYNPDPNVNCSSDKVCGHKHNYILYGGPSLYSHSLSNVLALVDEQRTLQIITPIKTSQNTLADGTGAYQRTNEYLNLYLDGNATPLQLKLDTYTIINNYQILKLNDKLYYVIETQKLKLNKIMTIVGPFSDKVEYPRKLIKNDNGVKLRMYLPNIDSFMGGFRGLNYEEHEFELNVSLFRYLCLRNTSGKVGHDTLRSYAVGYSLRRFVVHSKVVSNPTIVYEDIDIHVILSRVCMMKLRNCYDISYGYTQFSKKLGPFRSWLGDIESAMTSSFLSLINKLIVDAMGLDWNVVLNFIDDIRLQTLVDGISSTNFWEKLLAMAENINTEDVKVVDLDQGVDVFVGPNIGSCNHHKDTCQHMDNGSEQRCLCCNMPITEFEFCVCCSPNQKEDGNFFDIDEAIKKEVKQEMELKKTDPAKKGALNKIVEEIEKMVANKDIKTTKPGSSTGTWVSTVKRMASDIKESISKTTGKTITGEDDKVESKLVIIPGTTADGLPDESVVTPPSEEIPTSAAGWKRVTRRKNNDPQNMSDQMVAELLDKLQPLTVSSDSAEAIQILGFDFVQHCLDPMMYENMLNDGSKTLYTLPHMPMGEFGSQNTIFEVVTKIVIPNSEAMTCAYDSYRYGYPTANLDEMVAINESPPPLDNFTLVRYAESRKENLIIVGSKGSLWVSKNSLTSNDFHCIWFDEPESGGIGHFMPAIIKRASNDPLYLTHTLPGSRDERSQLIKLHYGNSWSIANLPQTFTGKDNLLIELTFYNLHTYMSNNTSTSLISILKHNNRIYITNNKESKVHATNREKIHVEVPSFLHKYADKLGLALQFKLAPDDVPEMRHISNELPNSYEKEIEEEVIEILRAFIRISNIKNGLEAKDIKFPYKGKLTSWYGKSKFMIRSDSMHKMKRYDVLAMKFDNKIELVYVLGTEGDSVILDKPVITSQEVTVYELKESIGSKIRALVGLCQPHISLEALKEKLKVAKYITGPAGYGKSTTISRQAQPGDLCVAMTSTAVQALRAKCKPDVTVLSMERAFYDHCKTNNTLYVDEATMANWLQLGFLCGPDANIALYGADNQIGKKDMSATPGVRYNVTLKDFLSKENIIKEFHSYRIGEPMVQLLQPIEPGMVTRAEHKTTYNITTLDNSEFENIKTIVSRLNPDVVITPYSANKIKIQSLLGSMKTRVVTTHSFQGMEVNTALVVLREDQNRSRELNGNPEYLNSALTRAKFHTEIVIYGQYGTLTDLYPLLRRVGGLPTVKNVLGPATKSSPAKVGVNEIDKTTGLPKEINIRNMHTLTSGMVDKLNSLGISNSGVILSYEKLSDGTRVVAKLGNSTVSTVTNRNGVIDIQANSFIKHKIMNNLDTNINIPTSAREDETGFDVNELIDVSFKQTNKLREMAWIIDKGTTNHMFLKIEGEIVKVTKDSGCPLFSGATFECKDEKLKISNGWQSLTKRRLYFNSKTEYVRLSSVINWLDLSHAKLKHNKNKPMGWLEVMKGDTVHTLWQFQERLTQVHLWFLNFLTVNGNPKCYFNNVKNVARYNKMARSLGLDPVNHHQSVVYHENFIAQSTTGWWRHKKYTLGNGDEILAEVSVKDSEAVWRIFAIESLADMRHTYPECKGISGTDFDIPGLHIPLHKHMAKNTAIHQLVCSNLAKIKEQIQPHTHDIIRMDKKGMHMVRNYLSQKYPKMTLTTGSYELPNSPVEIAMEQIMLNMVGSLSKDSKGIVAYSGYVPLTIAILGKYYIKLAIPGLDEYGRFFYDMSKPQLDSMLDHFNANRAKKVNWYIGTDVILERILLGTRLGGMTPKQINDLLGRTKSVYGWMPMFKKSTEHYNYDHKNKLVNFKNGKVSNPLHNELFNCSLSGKPILVSYEHNYYLEMSTMTEVFDHRLVQITKRPIPIERYIDRRIGAYSEMNNIIKIKVPWIDLDLLRVLSDRQIITIKELTVNKKLLRNILLRLMTGEDSHDDALNYARTLESTQVITDRGIDDLSTTNLVVTLNTTWYAIYIHNDYLRKFHGLILAVNKTQGKPIAVGLLEQLISGFSKLLGKMGSISQEIFEKYITKLNNNVNLTNRMADCIEEAKKTNWAPEMRNVYFNRFYFSNDGLGEINAWFKPGEGDDGPDGFHGKPSTDNKDEVYFDNEHFEQENASRYRQILSFDEPKVSESSQKATSEQIIESTTLEDEDSEFKDAMSSQEDISDVDEADEDIAINIEPINCLISIDNSLYLEQNVKNIQTRKHIYGYIDRLCQYKILSQPEIRNCFEKIHKDLLLNETYDFNSYQPIVSEGIVTSEELQEVKYKIVQYNSDYIRTNEEWTSRPIKVIHSSYHAIPKIIWTYWHTTTVSGLIKKCINSIQDMNPDYQVVVVTDENLGTYVSREYPGKNNRGLMETKSDWVRLNLLLKYGGVWVDASCIGIDCFDEYMELALSSPSGVLQVSTSEQTDPIKILENWFIISPPHNPLIREWMIKFEELLVKDINNLQDLDDHLSGGYENYEVIKHKLDEHSRYYLRCYLVEMLVIHSSGITPYALTADHSRVDVHHDVKWEEWQRIPYIYSTAHNLSMKVPIVKIIDVHRRIIDFYLSEGGIVDKGSWLDMLANSTHDVCTYTDSHLVDKIIDTTDKFYVKLDTDQKILAHRRDVARKYQKCIIKTLEGKNDIMMSDKVIEIMGIIFELGLMFVLTKTRLAEVLLELFNGSDINQLQPMEVIKFIEKHVAIKAVRRFKMITKVNTRINRCTSLPEKPKYVEKDGIRIPLIIWSYWDDIMVNEFQLEIIDNWWYHNQDYRIIILNKTSISKLINRPTYELLMSQTPQYRSDWVRLYVLQLIGGVWVDSTGIFQDSVHPLVIETLSHPSGVYQVSIQPRSTSPRYYESWFIVSTERNRLMSQWFNNLHEMTKHVHPSGSNALSWLEQNYGEHYHAAKHLIVPNLRVYLRVCLIGVISNMQLGIEPLSICEDEGEVSMFHKLPKNKWLRFWKVISEEPAENCRVTFPFIKWIGLQRNIIFRSYNPSIPPNPNSIIGLQMFKARVTYDVTNVGNLVCPNKELEEPTPKSIKIDQYKQVNTIIMCIGSGGDILQFITIYDLLESIGVPSVIVTHQDHGDNLGNRRKHLLTVSAESIMETVDVKLTKLDIGTDIKSYQQMNSMTKDLEEIIGNYVHNVKTLIINSAIPNLKYFSEEYKFKIIEVSTFPIDWVFGNATENESQSLGISLKKWVFNMMSDRSKLIKTPDRYTYYNSCSKLLYPEGKKFVGPLTLWSHESKADELIMSPRHILVTFGSCDKTIEASRKLMLFDNLINLGFTIIYHDPYKLCSAGTMLCDELYRRQGKVQIIGSFDLRKVSGQDLKILTHGGHGTVMESLMTNFKLIIHPIIADQYQWAKRLKAMKMATVLYNIDDAEQCKLAVIELNKLVNYNEVLGSVQGISTLEFLQSINTRAINYNPSVSLRALRGTVLEPTTLQFKKGIYRLKNVTYSIKYNPVVVDRCVLESTNFQFTSDGQTEFSKMRILSANRLKESAVTEGDLVNGVLSMGLNVVIIYNNGAGVVYNIFESPHLIYHIDRSCLPWHVSVPEVADYEEGLSMEELATPVKELPDDVITERDNLRRDFSVIELTNPRVLCLNLGKKKLENLNARLKGFALNELGARTELQCCKLELRRHGYVHVGDFNSVDHPLSIGCITAQQGWTLVTWQVKNNQMIIYGELGILTNSVLVNLHIQVGAKQPIKTILKRTVDLVSLNKATKQHTIMNHLNPRSSQLVNNYMQDYRLIVSDYDNRDHHMYDELSIMKKATEIIFHSNRRVTLDDFIRSHNASHNRMVLRQGMLVFEHHFEQISLGAILLGPSCRYDKEKGGFETDSVLNEKIQKFIDHYCSIQGPKLHMKDVWIVDGVQILTVNEIKPYITRSYVLSPAEKEKLESVVSKHPHWEVAQMTHLENDTENIRHIQVSNNGSIYLQSYLIVLRPPKTGGESELERQWWKMTHKKTESNPTPGNWWGMKRNETKKTKSEFLDVMAINELHYHEPQTLSVALSNDCEYQPPMDIYIAPYESVYPGSLLEPLTDLPDNIAMQLWEDNDLTNWLNLYAPLNNCIIKTRELPGKIIKSEKLTMTKWPIRSRAILTKVCFEEGRSIIGRMKSVAFIRTKMPNPFRLVLDIADTYFRPDWKQMISNFRQELLIIRPKDVKNWIEQNKDCEKIEKELIDLLCGELITKPINDVNVHLKLESLLKENFTIMTMQQQARIIVWQRKAVCAIYSNLFVEVKRRLKEVLHRKIVYADGLRPDEISARVRLVKNVAGFFENDLTKQDRQTDKPIIEVELMLYDLLGVHPNVIASWKEMHEVWRFKSNLYWGQGEGMRLTGQATTALGNCITNLQVHQKFTKTNFQTLQLGLFLGDDMCMIFSEKPDTSNLRKDIAAEFNMQSKDSWMVNGATFCSMVMTRTNFGAELAPDVVRLKFRYEVPNGVHEATAENVLMRKASYLMMLGKGPNVEETVKLLNLPIKPIAWYNYDYMVTSVAYKYNMTDEQVRGYYDQLLALIRSDQIYSHVFRHFSNK

SEQ ID NO: 1350 - protein, 3318 aa, Diplodia seriata endornavirus 1
MTHNTSNDNYTHSNNGQAWPDQSIVNYRANNQTTHQSERAEIHQPNQPAFSLLSLFSGPRRAQPPIDEEPDQVTFTGRALRARPAGWHPAVASGDIELNIPPLPRFDPTQHPTWTTSSNNDRLKPSLSWLDHDPTGPMIDGYQLTSIGFVALERMGMKLRTNSLYLGDYIDEEYEFILMPETRYEHPGVVAAFGNLGRDTITETFNRNRMYLRALEDVCGCPLASLNQRAAYLTMLHESGYDLITFLSYFSTWPQEMVHLHIAIWLSGFIIDFDHTILMQLKLSCINRIDPVFRHVIMAHSGAEVAAEMSKHQITAVDGKQLSTEQVCVSGVWLTLGHIEARSGAKFTIEQINDCDAVDGKDANLRKRMEDMMLGDTKDALRGFTAKGALDHHNKKIIDSTIRLNTLHTYPIPLNTSTSVVEALELSWPRKTFVTSTQCDDHPHIYLNVSRNLCREWIVSQFPRNQLLIDAGGDFYQHIKSSNWNVHTCFKDASAHDHERFLKMETKLMKYIQTTSDMVATQNGVKSLSEDRVKGLNRIRRGRQQYYHIADAENCVSRGHNGWSFGMSVDALFYISPEKYAKIMKAHNIVHSIHAITVPPTFMYAKSGKLPFNEGAWLVKDDVFSMTTNGESHVYSSSYKLLLKWLTTPLYAGDGFGMYVRNEGYKGAHMILRVTRVPLNVLQAVTLRHCVWLSGDADSFFYDVPLIKPNRHITALWRQPFETKRIRVNMTLLEMLQSRLRIEGCTDQDLHEYARGLKWTVYTSNTGRTRQFDLSDAEMQDHELLAIHQHTQMVETMKPLFTWARTPKRQESWLSQVWIAFRNVLLKLGRQVDPTEEDWVQELIMGNSTADEYKLGPSHINEMLHDITQYEGLAHQIESRIPAAITYHNRNQIKVSWKDQKMDRLSLVIQDDDMSNRIHAHHHKHTKQLTDKSCKPNPSCPHEHDTLDEHDLRRPDLPMGMCSCCGIESSLYGHLCDVCRRLQLCLTASRDCPHTHIIESEHCCAQRKCACKREQTCSCCGCASTSNPCLLCLEPTQPAVVTKAMPQRAQQEQMVEEINTRLSSATSQHSSEGIEIIDNTLSADDPLPPAEQEQVAKGTIQLMRHNFKFTKELTTIQSAKIEFYDEVPGNGDCGWLAVQSLFDLPNSDLARLKNLTRKTEWWGSQELGLFATVLGLNLLIKAGTQTTYHQGNILSQMYGSIIHMHDINGTAHWNPAMVTIIEPQVSEGKARAVSESLEDFIEPGADMNDVSVRAEAAERMLSTRSWMAAWPALSLLQNYPNRIIDQNTLTIPLEPMASTPLTRFISSQSTLKTRSALDSALVRQTRAHGPSDLIWFPRRLITIVGPNQREYVIKDFSVDGLLKLVSSKLNVTFYNDPTSLQVNQAMWICPTKAEAEDVANERELQVVPSGRTTGEACATYGDPIDVSHPHKVVVIGLSAETRMLNRRAAIDHNGTGMFNVTMRRPNLLAAWDWISSLSAIGVEHIYMPAPLNNFDLDDYDQLKVMEPTERVTNPRLSAMMSDMSKRPEKNFGQNTRNQPIGEIIETIRKGATPIDADDDVRNWVLDKGSPSVKHVTSRGGLVSLCRVCHKPMLTLQPKQACTRCNGRVNCAINEPDHLNGLMVNQDVITDTPRTEVLDMTMKSNLGSSGANRSIACALWERWLTVTNALIRHTTRQMGHRQALYVRKHSASIKSNTIAKPPNFKPCSDGEPVVILSPSTWCWAYTERGTIVSTVNMPDGPIDIIAHVHNVSHCPKMIAHAADGIDRKLDDLKEMLANSQVIIGVPGAGKTRKALHDNPGMPLITMQTDHIEVLQAAGHVAYTPSTALNKHMPETVIIDELGKWSILDLWPFVNRVKRFIGTADLKQTGAVITESKHLRLSADWLDMIPIASELTHSRRFGSKTAKMLKAFHQDISGSNESDNGIDVVLVNQNDIREFAQSMIGREVNRVITMNNRTLKMVQEATDLPVSTVDRTQGMTIPKTAVVIMSHDLPDCTDERLYTALSRHTDGCTLMLAKDAQDNITRRLNPDVAGLSPLISEMMNWVEGPVAVTIKIGKKITIKLRNLVKAICSCLHDWAKQIWSWLQMILGDYMPIAYRADTDEIVISEDDNLQYEIADGLGLAFDDGETPDLKLVEPTPLIEQEEVDVASTTSMESDRLVVKHPKPAEVETESEQEDDVSSVIWENHSNSDIGGRNDLAHTMVKRVRAVMQAILNWIRRVIDAIKGGYKRVGNAIHHIKTNHTQHIDVDQAPTMADFNPENIETRFRPISDRRSWATAMNDINQELRDALKNPEDGDSQPTSPSEVRRNSKMRASITQANDVEVINAPSHVLNRELGSKYVRDWNNKILKYDNTFVWDDLILNMQPTTVKRYDWPALEMQVPMMPTIRVMRVHESIQNNEGVYAIGIRNTWFLLARSKEGDTMEMFAQSGYSAMRMPALNTLMALLRRRIGGGRNHIMDILLQLADSLSRWLKIRLTYWKWYSRCLVDASYKQMPSTRVKMGRHREIATWLYSRPNVQNLVKTGRLKLVTSAGDCMAVIYGVSRKRKHGLRESHLMRFRQTEVVGECIVDEIGDRIPTSWVTDAVKQIVMPSFLERHGRSNSMPHLGGKNEILSKYWSRWLGMPSRAPITIDPTWKDVKYNMAFDATAQPKRMTNAFTHVNKDPTIKDTPHIVDVDYFHDPSVVAVCIPSGAGKTVMTGKNPTLMKDVDDLMNWPDFAQLQTLDVNAGMFMLTDQYRRKIAEWLKTDHEQRILLVHHPDFVSGLVKDILVVEPTWDLAKPWSRKNLQALASSHKNLDRIRPRNHGSMERQVKEWADTRLVLLLKARYNDNNEIDATAEDWFTNRDQSLFSEVKLPSEGRIKHRLPIMQQVRQNITVIGHAPTIARPVVHKYGNQLMNSITTRLHGVENLRKNRIDPEDNLESMAEAFFVPDWRELLIKYEENPVYPSAEMTEEWLSMKGDANRVVKEMREVVKALYTTKPFSDTKLHLKSEVLLKEQVDKFEDQIGRVIVWHPKYYCAIISPIINILKSRFKALLDPSKCVYSDGLTVTDLQGVVSDLTPKEVIEMDMKKQDRQTDQGEIENEELIMIKLGFPKFMMEKWHSYNSDWRYVSGSGIRARRNWFRKTGDEMTSLGNAIKNLSGLAAPFIKFGAERVLVLGDDSIAFGPTQWDQRWVEDHMAQNHNVRVEWAGGSQGKFCQFIISPIRNHGFIVAADFHRLNDKYRAYKSMMERGSEDWNMRAYSYLCLVGKSHDTMMATSRMGLPRPIDWSRAYWLRAQANANYHGVSRDRVDGWVSAMIHDMEHSTIRHQTFKVLGAKQR

SEQ ID NO: 1351 - protein, 5190 aa, Fagopyrum esculentum endornavirus 1
MGGSRPHSLRQGGGLVPLSKKEKYRMSYSIRKSFRAGGKPIKLGENKDIIPCAIACRRDEHKEFISFGAEFMVPDFNHLDVATLRNFILLYREGICHISTTVDKNKQIVKNVHLQNEEPCWGPNMRDYYATKLPDDICPHKEDPTPDLASIDLIKRILKKYGGSLSSMNKVSAHMSPNMTPHIVRQNGKFSVNLMEMQEAKAIHTCANCNTLNLVWLEDVTTGVKGQHCGICFCELDLKRTIPDHIVCGFVEIEDTTQIGVGAIELEMLKTTNNTDGSIDLTASTRNTLVNQDLRNARAALSRRLYKIVTVNNGLTSDQLFYLCQNNISFTLVQSRSTPNPHAMLASERKLAWYNFVERAATNQLVIDVGARYNRDNYHCTTWHGIGPCLDWRDIERYGSKPLEPNTCSHTLKTCNCSFPNNPLIVSIDSLYDVAAQEVVGFMKRTGAKYLLFCLSTAAIDFTSAQGALLYNQGEWCRNGNSLVTSLIGDDKPYVNNWYLSKMWTTADEIHVGDDVVNIKTYSIIGNHILRIVTLNELSNVLKKQKLSTQQSEQMVTMEIPLIKIDSWLSSIHLPILVRELVTIDVGLYQTLYARNLTGKLSFEKMVEFGLAYAHSKYTTATTTFHQKHLTANDVRLHAMLATIATRRKYAWVQQAISMNEPTTLLGVDLQAGTVYGTLEYCKSIITEWIGEFLKSSNCTHSKWVARLDKVISEWLDNGFWTELEQLGKTSHKINFIEYRDPVQPTAASTQAAYLCNHHNVSCDHMVPLRDACVCCGIVEVVGDTEHCACCSPNGCKHDCQHMCQGGLYHGPKQDRKVNCECCGVLSNANRCGNCIMTISQNKNQQQPPILQRDLAEKQDDPTRIAKSKVPKPKPVFEKPNVISNTAVMPIKPKKSKAVQAVPELMASATASKTILEKWKMGSIEDNAEENIPLSADKLQPSQQLHQNPDRQYRIKAVEQVTTATRSGEDSGSETGEQQSNEEAITLITDDGEIVVVDPTAGPSEEHANAIWQQQELDRRRQFTLQESELTVEDAATLEVSKLTSVAYASVLRHGWQVSIDSGALRRPDANPANTPGISEYFFAPMGISTIESNLLAVTNVCKVPGDGLCGWHAIHKALGSDANLIDLQQLSGRADWFNNEEIANYLRRLGKNSIMLMPGTSEVNKVDPNSNQYVVIRHAEVVVKDHMHWEPVNVAQLGVGSHFPVFQGCGTGSQLNKLENKYNIPFDWEKSGVLQRMNMAKELIKLNLGVRPLNEQQKCEIQIVEKDGRKWLTNNRRFKHYPKSGLVCFELDRALMDPIEKMVSMETMTARQMLSTEIYNMPKFADADVQEVRLAEVVDTCATIQKIKHEASNLSTLQSESWERFMVTATLMSDKRMRIDITNHKLKSGDLVGVRSPAGMKESYVTVINKNVFLDTPPTGQMKKTVLELFVPKTSYHSKLLRLMALQRPLPKKHIIEQRLLSATAVTGPGGSGKTAKLIDELDENTIVVARTRIAVNTIQTRAPAYRNRIFTYEKLLCDPVHAETLCIDEATMFNWFDVALMLTSDIKKIFLYGDPHQVGLIDSSVLGGDRYLEPVTELAKNKIQLTTTYRFGKTLADILASAGVPIVSAKETDTTVELIKWEQFNDAEFKKLVNKEKPDIILTFYRRNKRELEKLTNTRVETVHAYQSCEADRVLVMQMPTFNSRSQMWVNRSYCISAATRPRERLIWCTVKMQQRTTLANILSGTAVQNLVGGASDETLEEFIMRTGGQVGNEDISEVEEEPYLPTIAHQPVEMTERKWKLIRSPTVEEIVEIANSTLLESYNWKGYGLQELHSASQSVSPENMKWVLCEDCVVCEHPLGKVVFRLIEDDTKITMTCSNRFLSWAAKRQANQLYIEATTKFLENALENDDNCNKWLTSINASMRQIATKLLCNYITQVDSSEEEAESSKTSSCSHSTAGSPDCSHTLPSTGKLSTIAESPSSREASSDGDTDSSTTVRDTQSSALESTELDALQYSDSQEPDFLTASEGAASDDNYNTVSDTDGESTLDESARSSGSQEDTFESMEHDITTVPRRDRETTNIAQSDSEISIENDDRWFNTRTGDEEQLEQQYQENMRVDLVSMEVTTRKTSNRIDTYYPIMTGLLSQYVDMVMCDSMTTTTWHTDGMTQVLESCDIRGKMLEITLTDENMTVVITYDGSGGKLTELIISLIDKWNHAVLVAFRNNDVWQHMTKSQKEILKNRHGMVNPVVRDLGNRKYTLNQLLLEILEKHIDDEGPITMDDIVNRGEMKNKLGKSETNPLYSAINSHHCNEAEAWWNTQDVEMDLVKVSQQTMNKSNNTFIRLLAEQVQMLETCNLHCKLSLWNQSATIKTFGGCSLCCGLSVENEYGVVLKISPQRNWNRRRKFLLNTNNDMTSVNFWSHVIGIESVWNDNVDYSDLPLNRDLLLVEPLRLAEYELGMIFERIGATPKNLYNYVMASHEDHKLCTYYKEINEQYQTKVNAALGTNYVPAATNRMGSHTSADGSLLQFINKSTGRTLLAQLVDNKLQVLKTSLVKINALKINQMLINVANSRMKRMPWRLARMTVKLLKLHNTKFGALEGHDIESLNLPMSYHKAERTGVYVHYREKLEATMLANMKKTFHIVFVHSKQFDKYKDLLKHECQNLPIEKQNFSLVEHGFDQLVEQIHYKYIYNGLSKNSKAIAISDFPYLSMLTSAWATHVRALSQIKNARYVRNLLDTEPLLRKIIQIFGDKKQVKENDGATEDYFNEVHAAAVYQEKYKNGPWFARNCSGPQQKVADLLWIGLTGLKMSPEQLHTTMCNGQYKRVSMLVPVKLNDKNDYFKVVGEDDATYTVAYDESEELTIINKQLYNSVMSGQPIKVGPHWLVFHSTNNVLGHSTVNVVLCGSAAMLPNYTRPLSQSNNVKGVQFRIPVIHDLRAAIKNMEVMTTKVVTIDHKLYRSLSLRMLRTETTLDDLLAYARVNCHIITYTNKATGQSYIRNPDGVMEACACVYYENKRANDSIAKLTEILTQSYTRKLSFSSVKDVIKAVGLNVLADVTSFFGSKITIDEILNTIENLVDGSASRFIRHLNKFCFVKLTKRIEYPKIVYRIGDTVNSTPSVVNAMDPVLASNMLKAAVGGVYNWYQSIGCNTNPAENYTRRRESCISAMCRKLEQYTGSSKKEAIDKVAKSMLQKYDLQTVVDCVRKLFNNLQDPIELQALPNTLEQLSELTNCDLTPKANIKGRMRHTNYTPEMLSRETNICSWMYEEQVGFMQGKTVLFSTIGSMGDVEPFLGVANWWKKFGIKCIFAIPVALCDHVEAQGHQVLKLNVSVTDLMSACIKMEESKYNLIQLAKHLNDLMVTTSRVFDIELNDWTPILQQVDLIIETPFTHVAAQLAQKFRIPLIISAAYPWEYSRMTSLKMQPCTLFDMLSGAISYTPFQHKLSHWRRTALELTNMRGQMVLLAGNPMLQLHEQPTTVWKLGNCTSVVGYSLQITKDMQEMTAEHLKLFAHNRVVAVCFGSMSNEGFEEWGQEIYEKLMTLFDVIVIVGKRWKLKLSNSEFPVIAYDYINYHYLLPMVDLVVTHGGSGTTHNAIRHGCVVAIKPFFGDQFAWLQATKQLGVGMDTNDMLELDTTKLDKYKQKVNEYVSKIEEYDVNANITASFSYYLEVGRKHIEGIVNDEAIPVNEMMDFNCDRLCRLVTNQRPTKWSDYDDLEAATELAINDVMEYAKHSKVTTKATGKQKSRKEVNLALPEVFASETITKSQQKKRPVTKQTIVTNVDETRLKPTEEEIEMEKAVQLVRQPKSNLVQELIKKFSQPAVSTAPSKRSGYQKSNRKSVKIQRVKHKTMEFIKKMAAAELGPLEETFPATSESSGQQSLEPEKVSNIIEAQLDESATDSEKHRTAAAHKLSSERTTIEDDLEKLLRPTDPIGYLQNTGSDTDPESEEIINTYIEKGKQPELTETAILSLWKSNKTPMPKEVTHNSSNRFGLLDSMTEEETESQSIEQKCESPEQTNKELMESIPELQSPNKFSISPVTSICYSKIAEMESSDTDMSDESNDKPLRNHLNHKWRLKFIRNQVTCIPEINCGSTWNIKYDDWELEYNPETTDTCVYECAKFICRTYGHTKVDNDTVYYWCQRLGIRNKPSMNEAQNLFQLIGLPTFFITDSKKLLLNSCGQVPYIGVQLIIEGGIGHCRIVKLHGVQLLDKVMTERQPTMSKALRDELEATLAPAALTISKVRRRLLCKPENFANWSGTGTPYMLQELQAKLSMRNLRFTLTRKFKPVHFVKWKIVGNVYLADGTTEKLKHGALVLFRRGNEYLAGLIVLTCYGMVMIPMNSAFSDEEVCETVETEIKVMNERIIRKKIIKPPGGLETATCLNEITRSALLSTNPEIVDATINDESASHLFIYEYDGRAHHKYDELDIIKRFHPISIQGVGYDIKAEWLEKLLAPHGAVRYTLQRQRLNIVVEFQTLHQAAVFASVASKSWPSTIQLAKQVVVSWDEAQSTGERWIERHAFLNKCERGVSKEHISWLTGAWMTLDQQQLDTLMVTKEEVENVCGAKLPDLLFRPSENKRITGLDYAFLPPDSLYRLPQLRVLFAKKSIILECKLTKQGGSEELENRVTSKLPDEFNVNKHTRWWDIHVVKPETQFNMELWSNRINTEAIMGALDTGTGPDQLDVMTPEAGIQDHVFIHNNPTEWPEHKNDGMVAMDDLDYQDMAMWHDTDFTDWNEKFGPKNQVDVTSRRMPTEIKTSQKATMVEYPKFSRPVLTKAANQEFNAVTGRLCRRENYRKYGYKLQEEVWLFMNAYFDPTKHDLLDYYQCHQLSLNDGKVLDWLRDRPDANKIAAELELILSEGFEVHPINNINVHLKLESLLKEEPASDLRQVKARALMWQCKGYCAMFSHIFKELKTRLKSLLKPHIIYSDGLRGDELSSMVREVVDFTHFFENDLAQQDRQTDHDTINFEMQIYKLLGANVSVINLWHNCHYHWKYKAASVMGVRDAMRLTGQATTALGNCLTNMLVHRKLVQTIGDQLRLFLVLGDDGLMLTNGHINTESLNRELKSNHNMMCKPKCNMQYGTFCCMLVAKNHLGSATLGPDFVRLRRRFEVTNGVSEANDENLRARSMSYLMFLGNIPEAMELVELEQMPIVPQKWYDYDTMVEAMGIKYGINIDDVENNKNQLLKMIREKKIFIKTIDHWFEGL

SEQ ID NO: 1352 - protein, 5174 aa, Fagopyrum esculentum endornavirus 2
MRTARSFRTKQGVLFFNATSRAKRMVTPLDNDAHNIIAEILTKSELEEGRNSEEGISPDRMTGTANMMDLQFLLRQLRTDKDAAEKYYAVRSDFKVDMGYHIGQDHLDYAWEIMNEVVTCTTLILDLYGLYRFIYNAIKDMISEIGSWSKCFLMEQEARARLGVGKRPIVGFITQEAVTHHMVQRKRHGRKWDQRYGYLACPHCSSLNVLDAERLGVTHLPLNPDGTANFPSALCGYCHKDLTEAESPHFDCHLSPVPRYVSGTVGSKIEQSLLLNRLGLSPPEAADAILDVAESHDGRIVTSQMSRLNLGSCEIPPNLTSEFRVSLNSEFPDIEFVVRTSMWSASPETTAAINASMTQITKNVIGHEVYWPTIDQQPVTNRVRCHHPAKDCGSTDCDHWCGRSPVITMETLALGAEAVTTIISRTEMASYVILPEAGYSPKTETGKYSGTNDHYMNRGGMVHYLKAGMNSPYSIHGSTFKSLLYSDVINIHKKQYRIRTVLQVAHMVVREVMQMDRTAELITPHKPTSELKVREFTIPELNRGALLELTGAEIVTRKKVRVEASLLHALMVRNITGTLSGTELLDYAMAFAFTRYNIDKRVISYQHLTREQVQDHACIALMLTRRARWKVEGSVNMLRLTGADALKNKLFTSLGHMLIFSAQEVITSTKAGNLIDRAAQIANKLALGSIDMVGEDPVWDELDKWCAKVEMGKVSIADVGPEHGSKPAEPGAEEPGSCPHTWATEPIGSENCECCGRRCTGQHCKDCMVVENDSHYCMHECNQNHTGDTICLCCRLPSQTRLCRCCTIECEAIPMFEPPPKETDGDEMREGVSGPARRVAKSWPYVKKDKDTQSNADRTVSHGKTKQLKKGSAKKFDDPEVVITVDNKRDFPELVAKPDQTDQTILKAGEVETPIQLPAPDQGQPPTTKPSYSDKLQGARPMKTHNDDEEEEEEVTETSLKNRAIIEISEEFLQAITHLDSWPGGTGVLAMSGEKPFTSHCPYLLRGTTTTGPGYFNPNSTGVILNSIGTCGLDALKVVWDMNLPVAEMEAMTGSTIGWAADELITVAKKRRKNLLIITANETRIHKAESGWDMPTIIHSSAIKDDTTNHWYPGSAQMIKLPTEMIGCNDVAETAVYDSLTRQVTGGQQQTYCPSLMTISERILVNLGAKTVGDELIEGNENMMNFKMVEIDGKEWLTNNQEREHNVMMGKIHVEVKAMYKQIVSCMCVGSSGVLANDCLRPRYDRDPGLPHDMTNYLVAELADTVRTILEVKWFHHTSNPNSKIKLTQEMCSCEPTPTGALVTFNNPGMKTFDMISIRTKSTQAMVPVKVIQGKAAVPVSLTEKKRNMQIGHLRLSIGSMVRKLVAILGTGPNMSLTRKLLTEAKLTLGPPGSGKSTELAKTVGNHDLVVAGTTGAINSIKQKGVRNYQLMSLERAKYEGSTYQVDCLFIDECTTVGVVDAHILLNKIKPQRVHGFGDVAQIGYKDMMITGGERYEEGMHRFMGNTTELNTTYRIGQPLAEELAKVMPGLTSLANHPTELVLKHQNVYSRDMVIQAGCSENVDTILVFYKKHLNDLAKTLKTISGGSTDMALWARRVRTSTVHAYQGQEADRVMVIQQRLTAQPGIETEEEYCLSAATRAKEKLVWLSVGAFNPSTPLAERIRVGPKQAGYGLLASLESRIRAKVTIPVEEPEEEDMIIVMQTLADTSIKLLRNNIKRDYGMSFNAIIKDGKTTVTIQKWKLTVIVLEITADGAIKIIKDSIDKAGELTKMIRLMLEPLEMTQSRCTTCNQLDLHTSKCPQTPYGPAIVENIVRMGKLFGDLGQQLKLTISGVEYTFESTGSCDQCRRVVMHAGKDLIGEFVGQSLTMVAPKFRLQGDDQGLGLTWKRVINRGPSTEIEHDLLESLVTMGVTGNTNYVATILEKTHGLMQAGKIMVKKAFEDFFETPTGTTANPVRNWCLANGLNYKSHVTTRGQHIALATQAGVTVVCHTQTNTIVAVGDNMMGSDANMFDLVRRVLKHSALNVAHNFIARLLETKKIAGRGGELEFTGMLVGTDIHQKRGTKVWRNLLQKHVKNTVANLRGEEDKVYLTREEVSRMGPLIQKFMGDIPVGIHSHMIPIDDGGNAAEQLVSYVIYRNPSTTPDFTVTNRPHCVSFNSHVNTQIVRPTWSSNTDMDWTANLNIHKQCCQLLSECINTIREEETDCSNDNKLPEPEITTKKSELASRCLQNKPGKWTPFEGKMSGTVLLNHYWMTASDRDLIDLIKSHEGVRFICTCPMMSLEKYDEVETAKGEMMVILDKRTGAGYYCTKKNVERLRNGWKLEDGEGNGWVFKTLYTVLTCEVMEITKLSRPGPNLGYFSPVRMEDGLGLTHVEVPRITTDPLTLIRTGQHLETIHLLVDTRLLQSMMKRTLRQATFDEVLQFARVHANGMLFSMKGFKAQSTDTPHDIQWLAGAVYVAGTQQLEKFERVLEILEVKEAQYGLDAIERLKSRVRMVGGGIKAELTALVGGDASIEDIATYLLDNNIKSMQPLRELVRCWKAMNVNFGNSLRRMYPRPDNRKRPIELTPGKINSTLASRLRELVCQNVKVFVQSALRQVTGRSNRIRERNYKRRGTERLTDDPNVRSGEVYDPTLLYRDFKSIISDKVCALREYLLEIENSWDRRILQATDNERITVAEILQCIQVDMVEMGTSIGEQNQWCKIIDQHKLVQGHFTNEDVWKSQVVKDGLSKLLAHARLRRSGKGSPTILVHAVGSTGDYKFSASICHILSKSGAIVDAFVPADGAYHYEGMGVRKIHTTHYDTRAKMESWNKLQELNMEEAMAQLEQGAEPLRIDHFPQEVLDGPYDLVIGAITAVYAQHIAEKLGAAYVECNAMPEFVRDARDTWWKSTGVGQAVSSALNANIFIANNPGIHEFRLNQNLPEIDSTEWGLCPRPNVFCYEPCISTGPVSGNWPVIGYLGRELIVKQTEQEEIQVDYLFTMGSMVHRNIVGFAKEFVSQVGKRECRALILGGYFSTEIKQALGEIMENFVPDVELQHGLGKLIYKDCYSHDKVMHEGTIVIHHGGSGTTNQSFVSGCGQIVISVAFDQDYWGKRVMENHIGVQIKVQDEPAALTAAMNWGGWGKTFQVLRQMKRFITRNVATNLIRAIKMVVDETHPDSKLVHDGLLNTLTPVKDDQIFTRPAEAYKPTALTRQQVMYTSVDHECTKLENYDKLKKWAAIVMQFEGVRPVPIRRLWHSCCNNHDSDDFVFAETDTVYITYYKDQQMKEWVNYTTKEHQISQPVLPFKTNRGPPGTATLPFHAHGQVREPGLPEEKRLEVVTLAGHQQIIDEDRWREIASKNARGPSKDRRGKGTSREVMCQVCNQRRWEGMADTLVCTLCVAKAEFHQEGMAELSTAQLTTYNAIMLGEERPLLNYLMGIGISCDRREDNKHLEPGKYTVTPGRIRVLYDPQKETGCVRDCITAYASGSSASRKVWSSGKPVQVKGSAEAAMRDTLMRLKLPYLVDRGNLTDYISTIGLSHTIVQGERAIVNVIKDSWGHIELQIVEGPSSLHAQLVSLESSIYENAQASPMVTMPTRKVVDINQVECPRCKQLVWDSCSKHAPLWETDCRNNLTHKNPQTLWESMKAVMSRDQTNVTRSWGEHWKGIFERLNLRKFHHVLDEMTEPIMPCQVWRTENAYACTEAVRLTHGAIVMVPTYGGPVAAVVMQGIGCWHLISSKNPWQPTGGLLLMRSNAFPTEREQRPVTHSKTLCIYNQLSKTHLDEESETWHPVAVDHTAKRVVLYSLDVRDHHSGSVRDAINKVKDRLVKPDFTLWSAEEIEKISNYDTLGYTLLKGQLTPRVNLFVTSDISAHAKETLEYWWDRFNKEGHPRKIATAQRAGHVITVKMGNERGIVPGHPLQNWYKKFQPLKSVMDTLKMYQSEAIKEFRGREGQTYDIISMTDNVAIVAMMECINSDTSEILGIYSSRIGLHVIMITRSEEDRIMLVEIFKKIRMVSYAEECLRKFWEQQDKRLEDQPRDEDDASEVNPEAGDSSRSKKSDDIQIVELEDTEEEVTTSSGITPDPTVQLSETEAGDPLPATTKQIKITEITDDIDIETEGTPSQYEPAQVSAISKAGADNSTPTTSGADTTTATPAGQTPETEEVIIALGTQGHAMTQVELGATAESKDTVEDTQTASASTEMETGKDTSESDAEFFDAVEDSPVPQTTPQQDQAKVVEEMEELEKNRQQPKTKPMATVVTRDTVPITNVTAKTLTTQPRTRKPKRTATTEAGGADRLLLYKKCHKTHRYETDGQTHQPRPGKTGPILITGPELSWLEIVELGHKNRKKNLPIATTSNLMSILEPTLIHGPMEKFRIEGGKKVLEVMDGPEEELLAANQNLLDRYIPGNTARLGLLYRWLGCDDKGKYHNNMTAGVCGTREVCNPEELTEWLFKEDTARGEYIWNMFALGPQARATIQATRPVLHELSRPSNFPDLGTGRVIKHGQFLVDGTYVLKMRVVNTTGGQLFGHDITVQEKPDQYRHSWREPGERGKYKLGETKEVEIAGDLMKSGRTTKLSIRRFDNVRDEGAATDPPWEEMASVILKNQKVVLTSARQYNRYKALQEMAEEMDHQGPWTVELAPSKLIDLPKLDEVHGMVSCTLDWVYSDAQTEEIGEVECQSFLPYIEPVETDTGALVGDNSAYENVFSTIFFEDNDLLDFIMKVAPSQGLIKVSKIPSKIVKTTKTTMTKRPLEARPVFTKLSGAEFNAVSRRLCSVIQLRKFELYPESEFSRLKSAYFRDDCDTLLRGMQANPINYNSDEIRTWLAARPDGLQVAAELEAIMAEGFEVNPINRAKVHVKLESLLKDGYDSVGNREVEARIIVWQRKGFCAIFSPIFLQAKSRLKSLLNDKTLYADGLTAGELSARARLLPGGLWMMEDDLSKQDRQTDRNLIECEMECYKQLGVDERVLRFWERTHQNWKFKGSSVSGILDAQRLTGQATTALGNALVNMMVHSRLVEENKRHVRLVCILGDDNLILSEHKISSWRQVKDSKDYYNMVSKASHSKEVGTFLQQVCYTNSVGTMEFAPDMVRLSRRFEVTNGVSEANDANMLARTMSYCSLMGKTKGTERVIKTLGLPIRPTHTCDIAAARQAVATKRNMTIHEVEGAEHHLYEMMENQRVYHWEFLHYMDD

SEQ ID NO: 1353 - protein, 4815 aa, Geranium carolinianum endornavirus
MTTKCLSRTPITKNYVNLLSKKKKKNSKGDLTVKLPIFKPDNIKEILKCVSNTYVTSRHKTKIIPVTPSIGMGEFFSIMMDGLAWDCANNFGLTTFLLGVIQGGKVLSNQVIGNHNFKSSYRSFNEKVTSLTVDNYKGNHSAERLSHQLTRSVNLRLDYTGIKELAIYIGYDYLLFPEEDYNASLGDNFPLDQTENFLKKSLEWYRPSRYAELLGEGYYTEFVTVGKGSKVHNLNNNVFICVACGCLNSKCDDEVHTCGKCLSINATVEIDVNELKNYKCLVLCPSCYEFDRSINGPLAALSLKNYLDGGLLNLPKLNSELIAQDVLRYVKTRSRLDVKNQYVCANLSRDELNHLREEFKNLEIIVRNTWLDMQGMLMTESHCHLTTLLNSEKKITEVQGFNRSYTNVGSSETKFSGATHLTNWQESTGEIAKNPQVMNYNSIPKMEKLLSMACARKVYLIVPNVFDQYNGFSNGFSFEISNERGLVKILINGTTTVLEYTLEQLKLLLEYDYISCDGKLFEVKLIKKTSNCSLISVSKLKKNSLDINELGYKSIHPNQFKMFTLEIPDWQQNVMGLQLGPMIKRRIKFNMRFLKHLITRCEAWPVSFHGLREYAIVSSFSRSETNDIVKNVFEVNFEDIPDHVFCAYNIYLRQQLSTQFTHWITTERSLGLDKLIQGFAGGIVGLITNLMNDHQNDKSFISQLLGKCSDLSWLVSAQWDKIEDSIKSWETGAVKLAEFNGRIDESQRDVLEMCQHGMEKDLISNGCNCCGRKTNEPSGFCSTCNLEGCCSHPCLHRCNSKIEHFCEGSVTRPDVTIGDKLKCGHTIVNCKCCRKPSCQELCYKCFEWGQYDDNLTRMAVVDQTIYKGEGAESAVKRVIKQARGKQSYPKSIEKKQVTYRKEKSQPNKQPEKGTTTSVIVDKPGDSGEKVQMQITKKQERKYFGVSSDSSEEEANQDPLPTKEVDNKPVEEHEDKSSDEDEPVDDTNVEKLKQHIMINELRAITNDEYCSIICQKAKPMAELIGESVKFKFLYQGEIFIDPTSINSIRPIIVPYAVGFCLRDTLSYYNPIINDISWSDACTDMGLDESWCILNDVWKYAEHFEMNVLVIHEMEGEVAGVYGYVYDKYEQVNMIRYSSGKPGREDYEELRGHYEPCEVGFNKEPCLPPVYAPDITWEDVNQVYSNVTGGGDLGEFYDKNIEDRLTIALALNENKGIKYASSGFPKLELSNRRMGYLVYNNNNNQHEPRKGKLATFIKETTINSQLNIPSLLTRAELQEWCLENLVKEENISNDTECIKNGLVMIISQYLELKMSCEETFNNQNPDNSNISLLRKGIKVVDKGNYSIILALDGLERLKTGDVIMIRRGPNRFCCQVERNIKRIIIPKMPGHGTKLLADIAIFKISYTSLMIQLASMSHPGINLEKAKKLLTEATCILGYPGTGKTKELVKQYSQNSGLLIGVTRGSQESLIQELGSRNKIVFSAERAMTNRASSKTVYIDEASLITLPQLCCMLTPLVEKLVLSGDLAQIPAKEFSKVCGYQPTNILEFGKYAGATTIELKKTWRFGRRICSILNEAFGLDMQSATEKETNVNLEHSCGIDKNSLNRIVRDRNIDTIMVFTTQVERQVNSLLEPESRVKVARVHSSQGSSFERVLIVQDYRKGPAQGSEEVQFQKEYVIVAMTRCRKDVTILCTYESCKCRETSNESIARHLNRDLGLQYLYRGGKSHDIDVMGILNAIQDRVSGLFESVEPNLIKDWLQELWKIATGGIKKKMYMRMATMIKDCDDREVLKTLLDSGMPMVSDVVTENGKLYAMMNYDNTNWNYIKKKTMTLFNSKQLIECVNNKILIGGVEIIGDCGSEEIIVDANKFDSWESTQKHTKPIIIRGYKRKINSENCGNINMNIRLINHSSQLCWNAAKLTLNMEYMGVKYCIKPTTGCSLCGGIQITKQNGELMVFINNMYENYSSRDIQFKSESDPITNYLLGKWDMDPRDGHLWELTAKLLPNVNHNALHYTLWIERILAAIKGIKNGKTFNTQEGHFFRNELELNERILCRYKNIANEAGIKITCESDRNYSYFKNLSFLFPAKFKGNNCYVYFHKHKKCVLVNKTKKFELSSELVPKLWNEELYRLPYSLSLIFGGAEIPIKGHKEVINMLDLDLEKHDHNRSKLMLMIDEDLTKLAKDKNFANPEIAIPSNHIADGKDLGLASNFNIIPDVNLTGVGVSYLFDSIAAKLFSLNLMESGKTFITRYCNLSLRQDIERHIMIKPIDTKITHYKDSEAYQDCFARILSKRNTVSEIAKTSDNPETKTKHTRIEQILQQMLDGRDLSSVVMESNDSCKTNIGCLGVSCLEFGDIEIRKMMKELNCKRLIGFIPDLRNKSIRELVSLNEGHLLFKGDARDYVINPKWAQLINILYSSERWESSMLLENLKIVGQTDLFLVVDVTDTNEITVGKIPASMHNDETVVTVPQLNPINEIRRTGNLFNAVEFVIDNETLSRLVRRAMTPGCTLPMLQTIARNRMQSTVITKSGRRAGGRNVIRDVSLCALVAQYIANHNDNQITRYLEKIDDYLMDNKDWKRSSGALIHMLKLEANTIIGNALNIKVSLSELSKVLGEVAYNVMTDKSNKKGIPGIRVIHQPHRIMYGEYYYHGLDFKNPNSLNLDPNVIGNILRNSFKSWTKNVESKFAGYWAEPSTTNSKLSDHLVPGKEYSVKVLIYDMSGGIGRILQNRLKLSMKTDSVIHSSVCIGDNEISYGNGVRISPLGSQMVGKTSNPVTLGKIKLTAKNMREIDDITDKIFTPHKYSPIGLNCNLFSLWLIIQFGYMTRIKISDSKLEHLENLASLVPEFGSKVPENVRKYIIALNSKVMGNEELTTKIMKCFEYTVKSERPTGNNKLNNFIAHQLTILTGRNLTELRMQILEDDESESDSLEDYSSHDDDSDGDDDQNEGSNYETETDDTDDGITGDGSISNDPLGQLGQEEDISRKEEDQESDFESANSTDVEENEDPKESVITVTEELRVSNEHSSEQLAEEVPENNDPGSQSEVPTNPEIKTDLEVAPTETNKILEEPAISLDTRTVIEFIKEEMEKLEINKIPTAMATASDAIGKLFSMAEIDPKVELCRNVNDEILNGALNICRQARKDFTVTNEDQRGLMSKKEKIGTYNERLRFKIINKFKKISICVVALGSTGDTLPILSACKMLKLGGAWICLLSHPDIYGLDASNHDKFIKINKSQRRTTGNIKSDSAIDIAKHAQSHNIEALRTFKEATQNHDFDLVLSTPLAPAVTGYSIFLGLRTAEAFCTYCWNTGVEQGNNESDSFLLRWFGFTLKYAAVDGTLQILRQSLATSMLREMSIESPDISTVPRIVLSWDDVHSEKNIKDPKSVFIGYTSPGMKANVLHNDYRFRLLVGFGSMQVREEQIDEISKIARAMSKVEMTVTIHVQDEILNKLLIISMKNLFPKCKILLGNVNLGEVLANNDAMICHGGIGTVQECLMACCVPIIVPCFADQPYVGSNLERNQLGIMVGESETELTAKLKKIPMIQQRIKRKNYSMTDSARNLADSVLDLLESQPPARERKTAKPTTTEQSKVPSGIVIPYLTTPSESTALSLAPGEYQVNGVISEETVYKIGESYYGGECFKDAFNTGVLRLRGNEYHVRATHSTASITIETTSDIPKLNILGFYNHVNIQVLGYSNKTVIFNENWPLLSIYVTRTSERRKENNLHAFIVANRTDLVRIEHVAKTGDKIMSIIDVKSLSSRLSLPIGTDPKKAISSIINCNDELSEWDWKCYGSFENLKNRLKGENIDALLQSDSSLALPVLRTTQYPDGACFEININTRSLIGEVVYCFTTMGIIPGMIVRQSTNKIYVITLQPIIHLSGLIRCRLLRKKTGMIPGAEIDKLMQVSSSYVLNAETINKIKEIIPGSNPKLITATIQEMVTDYVVVATAFDTRSHHSDRSEYERKILIELIGTSKLKLLPNEISENLVAILKLTRVGYYNYAAGCLWYNIECKEKELCLSLASIAQECINKRGSFFNSMLNFRIGVEDTNEFRDFIKIMNNNFDYENNDVIAKTNGNIQEDKIIKINLEWFNDNLVVAENKIAGLVFSEFLGKEKEIDVICQKNIDNVNVNSFQLTSGVCISKSGLTILSLNPLIKITKVKMKGGAEPGKDKTDSEMGRVFNIQPNEVLMDQPLDMVKGPKLGKENFGRYDKWLKQNPHLEEPKVALKGKSIMSTRKFPWEEIYHTIQSDGQLDFDVKNVSRDYVQIDPNENESQFGNLESKVSDPAKGLLENYKVIDLWEGGRDLIDHVVMHGPTNAQRYTVKEGYYSVMEVTKTIFSKYPIQCRPIFQDEAYASLNSLTGRLGRSLEIRNMKTVPATDEVISKMANLFFHKNWEEMTNMYKTDPIVFNEKDFRDWVMGHKNANKVIKELEDLCAEGISTNPFNRFRSHVKLESINKPNAIEDFRQSAPRAIVWLPYCMPALFSYIFKLASNRFKLILRDNVHYASGIDVNDLQNYVNSVEEDCYIFDNDISKMDSQIDKHMIEIEWEVLKLMGVDPEVLESYKELKKNWTISNKFVRVSDSWLRHSGEPTTALGNGIINLAITSLSLSRTKRSDMKLCLFVGDDMLLVTKQKEDIDLVKLRGKKLANSLLKPSINRRCGPFCSFIIGYSDICSGMAVVPNVSRLAFKWEVPNGQHETTDESVFTRQLSYACLLGSNSFSSIVQPLINKQTKCELEIPTYYRESDLIRLNCDYSKLKEMEFTDLLNSLYNRILKPETIQVKFLITSENIRKGIKKMSQVKSSDHEPESKCHVRLTVDAD

SEQ ID NO: 1354 - protein, 487 aa, Grapevine-associated endornavirus 1
MTRGLTGNMGIQGSLDYALAIAHARYSIDDTTYNIYNLDAQGAIEHASIAYALNRRAAAKRGLNVMMQELSPSLRYLGQAIASTIQSGLEVIKAMTPNITGTVSQILDGLDMNSMNVLTRYASNPVWDELDDWVTKATLADVSSFGIEATVTAHAYCNHQHDKCQHSGNGQCKCCSSPTDNDMCDCCDSTCAHDCVHQCIGHDAGIGEWKTCLCCGKQMRTNQEVCISCEDTPEDWDSGVDYDRFWTFISRKTDKEHTVDFLKTKSKYNNEFMFRMANGTTKPARPAIEPCTIVDAKQGLHIHLCYCGTRYQHSHPFKSLLHPLFNGDCPKCDNNTTNPIVHEPTDVQRAPESQSFKPETTTTEEAAQTKAVAKVEKLDTTSFTDTTNTSKLLVATDTVFVDALIGFSGPDSTWPTADHLRPGDHPTMSRVVWVALGDYFTSQTVLSMLAELPSTELGPICGYTSWHAVDPNGPTYDVICNITGKTE

SEQ ID NO: 1355 - protein, 4664 aa, Hydrocotyle umbellata endornavirus
MKLKHPFIDRDKKIIYTMPARFSEKLDMYGFEFLCTSQLDPKVISKLIYIITNLGFGFTDPDKIDNLRTIDIDHSYVGKDKPKSGYKMMDSNWQPIKIPDCQSLDFDMATCGGETKVLSMIKDSVNKFGGWLNYCLKNTKARPDAFGRITHTNGKIEIEPCGLVPVKLCKFCGTINIYSQYSAGNGVHDSVKHYHEKWLKQAKMDKSEIEPDDVMKVDKNDFPTKYNKDGTCEVMWRCCMCQGDLNIDVRTTLAQMFTIIKAVWESLFVLCGRLDELMKQGYGDIYDELNEQQKLTIRSHDKAIVKEYFFHMRQKIIMCGNDLDRLSRAQLGRKIANLYMTHDSKLNSIKPELIVEVCIANKAIVQSTRELNHEIRYNIIPNNLEKTLHNTMFDDWCFKNKAVDFCNREAECNCPGEKVTYFGFAGCKATVLELLYACCLQGHTYILVPKLNDHGQFEDETGYTTTSDGHIYLFVDGANQPLIMNEDTFSVLSNYDCIIFRDKLFLITTELTMQYVKIRMITGPYNSYDQIPTHKNLLGDHPNIKMNLPKIEGIMGNWSGLNFKEVQFKLDMPLFRALCLRNLSGKVSYENAREFAVGYSIRNFMVNSKQIVNAHVQYTDIDVHVLLSQICMMTLRGDYTSSIKYVEWSRCLGPLRSAIPTIDNYITKTSLFVITELLHYVTGLEANSIITLMSKSNINNWVKGFCCNDFWQNLLMMADELQVEELSFYKLESNQKFPTFKTGEPLVVCQHHKEECEHEHGDMLCECCSLPSSSVYCECCATGRPTGFWEFVDTTVSQQEDDDESGFGLTVEKVKRRIKENEIYKQLIKDSQGKLEPTQLSWESRRELAKRRLPDVRFSRLEFPKLEEIKRDAWGHPMEEATKEQEIDERPISPKVPFAKIVKEGQDLARKIKEIEANIIKPVVPELPGLEEDTKITEEVERQKETTIDQITQETPGSDTGLTPIKVERHKYKDVTYKKLKPIKFEYEKEFLLRKGNVLNIETMINEMLPILGNRFVKHVTDPIYYEGLANQDTEFNYILEHLPMGLIMVNTDTFKIVKTQDIPNTDLLTCGFDAYINATGSGISLETFRAITGKPNTFSDMDLIDVATAEETNLIVVTENIVYIMHGSERTDEYHCILLIPPTEGATIGHFVRCKIERVKDTPIYLMASETSDREIRHAMLKDLGLSQTELYRVDELTKENNLEIECKVANMKKHLSNMYSSKLGATIYNIKGVHYFTNNATRNHDLSLGEFNVQLEDSMIGPAQKLITVLTSDCTDDSIPGHFDKPLGLPNDLVSFRKDYIDDNLRQLCRARDIDHMTDEKNVKAYYSGYIKPWNGMSKLMLNNVSNMKLKLLDKVVVEIGKVKKVFSIVDRDGKDWMINLPSLTELKVNVIESKLSFGSTLRNILSMLKPLVDPNQFRKILTNTRLTIGPAGCGKTTEISKIAKPNDVILAMTSEAVNNLKHKVQQCKQIYSIEKFKTLSIEREYDLIIDEATMLDWFALWPLVKDNTKVSLYGSDKQIGYIDTSETPGVRSVDPISKLITPENIIRLNTSYRIGEPLITDLRVFDEKIKTLADHRTEAKIECYSWDDKDQIKASIIAFKPQVILCMYNKVKSEISALIPEAKQMIQTTHSFQGNEVDYAVVVLKSGKGNEWGLNGDALYLYSAITRAKHMTKIIVVDHQLLPPFTLAQLITKKGGEDDPEIEIDLITINNMHTLSEQEVDSLNEMNIDVKGAKLKYETIEGGVICKATMFGLEVATIKNQNGTVTVTGASHVINQINRAKNTPIPILRSQLAKNMIKKKLKLTMRASARLKELGWLIDKHPKGAIEWKLCEKTIKFIKGSGCPTMSSYTIIEGENQIIISNAWDKLLRREIIYKCDTKLSELAIILDWLDVKQNVFYTQISYCDTWLNVMEGDIKTTIAQFGERLSNMHIWILNAMFNDKGVRCHVNNMKNVYKFNNFVGHNKARTIDYHQSVMPHKSFILEANNWIGRRLYRLVTSSGEIVSVKVNDNTKDYKEFIVEALSDLWFKEPEKLLKGIDTNLLDIPGLLLSVQKHMQENTKIAEFIKNNITQMILETKNPMRDFILVNTKKRASVTNMLSVTHPHQQLMPTEMSTYLSTCEIVVEQICMNYLFRQQYSNSQIELVYGGCFIIGLCFNNLYNVKLMDYDPNNHTLMHFKMQWHIYNDMRISRFKSAEIKPKSTDLISNLHGECILLLGIEIISYSSEKIIDLMKQNKSITIFGAVPIETGPNQWYHMYGKQMIAYKDGMYLRKIGNNLINLANTGRPMFVCDGEYISVEVCFEIASHKVICLTWRKIPNTCYIKRSSESTRVRPSQMELTVPWINFNFNNLMETSSLVTTKKIIVNVKLLRNLLIRLMTGNDSWDSLLAYARTVESTYIVTESRLDDMQAHSIPELLNTAWYALFIHKNYLGKFKLLSQIVDKAMNSELTLQLLNQLVPGLMELTNVVSEIAEEKILNLIKYLSKRLKLSSEAIQAIGNLERSEWLKQVSKHRVIKYKFKGHVSSTETTDDNKPDEDDDDDNDTYTDGKPKKELNELSRTVKKLGKRITDWVAVSESDSSGDHDEPIIDEIDNKLHSQDENVEIEEYYEDASQEFTDDEEDSVSETEDSSIEDFRVDIVDEIIEQHKKMQEKMSLLNEGNTPIHHLTEIENNHTAMMQELIIINERKEKFDDVLLACVADNMNVKDSSVTSAFKGFWNSLKLMSDAQIKYVAEINLSKLCAMNTEKIPITFITSEKNKNKLPKLIWAYWHSREIPILVWKMIMSWQRQMDDYSVILVTRETSNRYLENEIINCDDSNVAQYSDIIRCALLAKYGGVYIDASSYMTKRIDKLVDWTVNSDHGIFQFSIFDNKNLNKSYENWFIICCQGNKYMVSLASELQRMNKANVNDKLDLQVWLKTRFDEIIAEVAIRGVSHEMMYYLRTYTVQQALIYKYNLDMSQCIYANECPIIYWSSHHEKTWVEKIKNLWDCNIDFITGTQPVLKLVSNLRMSLITYDNMNGVAFDNSLLEILRKTKLEIINVCNRIPLITTETRGELEVTVPKLMIKQSDAYIICTGTTGDLDPCIQIGKLLSNSGKSVAIISHYDHENKAKKRLTNVSFYPLQISSSELMRAGISFYNNTSTGVILNANSLHTKLANEIETLLDKLNIKGKIIIATGMVPNLDNLIERYNALWTITNPFPLEWVTGSSSSKISTNIKNLLAKAAIQFKAKLTKKMRNEKIIAEKNMLYTYNVHLMDTIPDTENENTFIVGPLTSSEGYSQTKIDKTKRYVAVMFGSCINFVNHYHVQVIIEYFVSNGYDVILNIDPSQIKPHSHLENLVTSQTQKVMCLKEVNLRAIQANVDAVICHGGAGTVNESIRYKIPVLVYPIFADQPYWAKMIKTMGYGEEINYNSMSELLKTLDYAMVNLPTFKRNITHNASVINNGKRFNEWLRQYLPQICNVRMLNATMALSHGEIKASDLINPQIEWTPTQLGIFDTKTFEVQKEIKIKTSKQCVWQSIQKLLSVDGLKSIRTITNPSFIKLRSDAVKPEDCVNGILSIGLNLIIVTDVKALCYNVYSGAPTIVLRFATNLGFMHCTPIVSINCSNWRPVMITSGKMSQFNEELIKITEEITQTSEAQMWLIKEPELMIRWCGKETVADCKARLLLDSIVTIKTRRFESCITLELDEFKDGYCSVVHVKQTGLRLGLILGYTGWRPVVYAVKNEILVLLTDDPINKKNVLIDLGKPLENLIARPVSITSEIFKACLNKPTKAQLDAENDVNKTDVMYSEGLKNYIILVTNYDNRKHHKMDELAIMQGAIRVLGANNTILDVDKFAETHDLPINRLCLINGDYYYTTEFSSVQDANLGYELIKAYTRITKTDYLLGDELVSRGSNIYTRLQLTNEMVTMMKNYYHEDGHKVVLTHRLDERLQMKFEEFKELFLQHCRDWEGIAAAFNIVENINWNNEDEVKIVDRSLNLSRLTSTSKLNLGIVIEKDRIHLLICDITIIKSGIGGAQEMEDEDIDKLMVETQTKSRTQSESSHNEHLRVDKLTTHERESWKDNSTEFMHSASNKWGIDENSLRDAIKAKLSSTTLKLKHVMKPDRLTTVPEFKEVSFINIMTYSETDYTPSIDVTGDEVEVHEDFLDIYIAPYSCRYCADDIDVIYDWPSLEAIKLWENVDLTNWLTMYAPLNEMRIVSNELPLRVIETEKVTLTKYPHKSRAVLTKVCYEEIRSIAGRLGSVVKVRKQSPEPISFANRLAETYFKPDWKKTCEKYARNPIVIDPEDVRSWIAENKSCPLIIKELVNVLGCEMLVKPLSDVNIHLKLESLLKDEPIKSWREQQARIIVWQRKAVCAIYSKVFVEAKNRLKEVLKNNVLYTDGLRPDEISARLRLTKNAVGFFENDLKKQDRQTDEPIIEVEMRIYALLGVHPNVISSWRMMHDEWRFKSKHCRGTRKAMRLTGQATTAIGNCITNMQVHCEFVRANSHALELALFLGDDMCMVFNEKPNIKKLKEYIASHFNMQSKENWHNDYGTFCSMLVTKLNEGNCQLAPDIVRMKYRYEVTNGVHETDEVSTLMRAASYLMTLGLTPEVKNAIIELKLPIRPIEWYDFNLMMKGCMSKYNMNYLEVKGYYDDLLNMITKPTIYRHKFIHYTSEENIKPHHN

SEQ ID NO: 1356 - protein, 5522 aa, Hygrophorus penarioides endornavirus 1
MSALLNNARSAGRGCWRIYNLGSVVLQRVTAQYVRVSTLQMFINREALSSLMVDYKQTQPAVWHVQPGTTIGALALLDQLQPWEYLGSDSSSDIDSSTMSERTEGTYYQLMDDIEMDILQQASSAGVAVNATTVTPSLWQWFTTTIELPTCIADIAVIVQRSGHFCYAQAVATTPLEFITAVAEHGVAAPIDWIIAVMLERGLNERTGITTPPTIINGEWVPGHIQWTDEVDTPLLPQLMAMRAGDSPAAGLVGAVELHRPYTFRKKPGKNATVQVEGKIPASPHQPSMSHGDDPLTFAYLGGYKEIGDIRGHPGFASEHPLGGSVGDRLKAWVCAAQDNEFARLTWLELQELVHHLFVGTCSLTLQGELPLPWVVNPGVLTDAGRGPIACRELLSQIITLTRAAGGLQGLCRYYHNTLNTLGRCYPDPSTGDRRADMKLSRPGMFQARDHLANIEGTDLRSLMDNMLSDADSLPPHEWTMQTQRDMAVEACLRSHAEPTSILAIMRTLGRTRPAPEDFHPPPPVIYSNPPGMDEMTLGLECGAWRSCVCEWCGTRNASPGRLQPLVICCGLCGHPISREDDVATKLKSMATGLPVETTDAIRGILNLRTMSTLLDGWQPDNSSTYTDVVNSHDFRLTALHLSRIKTKVIALPGRFNNETLEWLSRAFPAFELLNQPSSGTGCALLLAISDLMTLKVTESMVALNHVVYNRPEWFPPLTNKGTTLRHFSQLRASHDTIVQALTNDDGDALITTLRTQVPQIILEGAAELVGAGAWRSLIYLDSDTVVRVNYDFCEALDKGAVIQAGDRVYQVLQLDSVGPLATYYLHQPLDCNDVMGHHHRVVTTDSMQFTLPVASTTSIVGLLDSNLTTEVVELNKDLMLRGLTRAMMPNLTFTDMLEYYRAVAYRKYHTVDNVIKTIDVSAEQAYHHAYAVTVLASRANAMRDTTANHLGDKWARLRTGGMNKAVQLLMRSLGPALSLTSDDIATAIEGLSGMALNTLNSLATGPVWDSITVWAYGSKVDAVDLFTLGRAPDPEAARCPHGGPLATKGKRICICCAGPSYSDYCTTCIPESVRSCWHKLTHTTCALPHDLHCSCCGDQKACSDPCYDCEGLDSALAMQPNQMNWVEEGQKRKQEGGKERQPGPPQSKDIKANETGNNKAQVPATSTTEQLVDAKKVAAALTRLGALIPLDIAEAIASGTGVSNWLEDVNRMGVGRLRGVPPGSYTLENTWLQVLNTASISQSQQECGLETLLQLTNSQSRTSVVAAVGRAGGWTATEFGQAAMALHINVLIMSPASTALHVNCPSDEIYLVIHSAVLGASTGMHWLAMQATSSERLPTMTTPITGLNPNYLDTRIMTVTQWAAPANQLKRLEQALQLVGMLNEKSNVTWKWKQGSKGIMLSNSNFIHEPDLGKYSIWLPEQMAPACELLINPGVARHSPLYTQGYDVPHGLQEDYSPTYNAQLQSALLDMAATLAMPGLEPGHEWMKRFTTEVVECIPIAKGKVRLVTPRPLKTGDVVYIKTGAWMPYSVLAAGGHPMVTAPLQKMAVTVMIPKASFGSHLRTLMAADLPYLTAREFNAMVESARVTLGVYGSGKSTTMVQEANQHYLLTAATSGSLNSIRKKAKRLNKKVTVCSIERATYDVNAWEGITHLAIDEGAALTVTQLYMMCRKPVQLHLLGDPFQVGTVDFNPAAGTRDITPAYKLSKVTPAHLTTENRIGEPLASCINAIHPWEITCGATHTTSVRLEYTSSDLEQVVPIIVATDPDAVLVHTEACMVRLKSALRKQWKGPREQLERILERVRKIHANQGDEWPSVLVVQWRISEPGIEISPQYNYSALTRATKHLTWVSAGLHPTGTPLPEMAGSLPVGYGWWTNRQPTFSLPNNVRLGGEDPGVISVNRIRDLVTKNANAYGAVARVDRHEQTDTIMISKYGVPALSIDVDIKTKKASVTLNQFNVPTEPIITQLEATYTMQCKDTIKPTFQRRPTQLSHVDDVIHRLALLDQLVGLAYGSVPLPIGMDDVTAVTGRELDNTEVDFFYKNEPVLKFTQTARGPFIWWSTANRHTVVVATLLRYFDVEVAGVETAHLYTPSFDEQLPILHTHHVWAGRLRKLWRFLEDLTVAGLQSLGLTVETSTTSKAERWLHAIRQYREAQVVGTGAHVVETAIPAIIGETCWHVVKVMNAQGYVSYVVESATGPRFCRADQTGDNGLSIGPAEMTYMAMQRLRTLRSYESTPIGFGDGLVRPLEWHHQHNTKVARLLTNVVAQTTAKAMSLEPPTLYIGAGAPAETKALINAAIPRVPIEADTHAYSPVTGYRLTELCLLYVVRGYMPGVVTCYTPHVDLPLQLSWWAAVTSGSLHGNPQLLAAKRTSAEYSRTILTKLSSIHRTVADVGSLSEREQLAITAISDRAKLAQANLDGETVFVALDQQLKLKTASIWLSPQEVCMDNILQVVERGVSTIYTAMPSVALEAEIGRDYLGNSYIQPDGELGQCFRRMSPLVVSTSQCIQPELITSCLGMSIYRLNVRNGLNLDYYSSPPLNTHGLSLRRVRLPYIHTSALIASRKLVVEVRDAMIEARLLRHLELRMLGAEVSFDDLKATATVALSGMFYTATNVAPRETINPDVMVDTALYAWLKHHDVLKGLNRGALLTRPHNTGFLSDTLQHTKDVFGGLVGLLLNATGLDGNLLQLVDELLPESDFDEQTKFQDLQPRLLGLARPIMHYRLTDGKLATAMCNVESSVAKRGATNYLPSGRALAAAWASPPPMLPLITMEGPDDLIEWFAHLGIEMSHTWRVNCPTDAMRDMIDQAIEDSYNLEMQDPQVRRRVLALRKAMPEGVRVIRSSDDVSRLCRIYAEHLGYNWNLEATSGPSYKMVSAKELLANLQIEAHQCEMHIRQFTLTPAGTFLADSLREFGQLRHDQVSSDYMYTDADIEDVKTCITGVRHSINPDTILSLQVILSDLINSFTPVAAIQRHEYSTLNVVALSIGSMGDFLPIYHVCRTLAEAGANVVLHCADELTHLVQPPVKLGKGGWSIEQSLTKYTKLRAGSYEERLQGLGSFIQTNCFTRLELVDHLGCNLVLGTSISTESYLLAYAMNAPLLLVDALRIGSDTVAERISRQGLSIVTAAYLDTKYRALTQQPLDYYAMMATRTMRASVTLPVLAANTPSIGGWGEPFWGEVRGQWSRELPNGSVVVTAGSMNDTSYLRDLASLTQRITLPEGGVLLVQAKIHDQMDPNAREVVPFTSMDYLATLTKHTTLICHGGVGTIMSACRVGAHLVIVPFAFDQHSNAGIMSEHGALHVARDHIQLESTLSKITSMGPISGALVESTKQHTSPTAMASALCQCLNQLLEWNLPSEPIQPPMAVQPTQQTAQSLIAAMGAVQIPTPPRLLGRQLGVYYSNNQPKPKVNYDPPSMGPCLTDAIMHDCVHQGPLVPLSHIQNGNGWLRGVPPHLVPAYSAARGVNLLLYSESHYELYFNYLNRPLVRIIMEQGHACTFDDPGNLPLQSAPPILGQTKTAVTYGPMALDGSVCFGGELTLTQEQAGQLWRNYIDECAPSDVGAAIQEYWQTYVCMKYWSSRRHTLDVVGSVLPLNLQPCRDGALCVEAGEITLGSVYAVCHQDGTVTLALACMRGESDWLMYSKPTTSPTTGVVIDTRVRLFSKGKNRATTGGAKSAKAAINKATADLLAREGRQLQVQRAGQVCIADILVVAEYDNYTHHHAGDIEVLDMYEPGAIEWYYPPPDLGEMRFDDRLRLRTEPYRLCLTKGEWWWSSRILNERPEDVHTWAILNGLADNHGVCSCPIAARPPAILGQVTDTGVVLDTLEPPHSTTLTPTGLRAWLRDAFDTRLEAPITDRNLTVSRAQLPAQLSTGATPPILRVPLDGRPGSILVWMVGPTMWLTSTGHLGCLRLEISDTQEYVTTVHNIKEYVPPESWFDVPPSTVARPVKSAEASARTVQSNGGIDALHYLNYAAAVSAARAVPGLIDTCTELYRQVAEACNTMTKHAKHKIAVVTAHAQYNPPKKCTAINLVINGQGWKQGWLNISVTTPFRTGRELANLRLAPLLHGNADVIWIITNGNDIGGLTKQVEALAKAPLVPGVATRQGAHSPIGAYLVACHGPATLVGHKETAHAALSTTGWWYGADEHWFMNYAHNEIICGAGEQLLLEKRFLHGMGTLTARGSLTPQPIWLAGDLLRFDENQWRVGPSITPTPAQCGSPLYQVSGPTVYNEDEAKALQLVLGLLHGTNLQEGMMLLQELARRGVWRVGGRLGTHNVYRTELTSSSIMLIAKALNQRALEVPTTLTAAKGALDIATSSTYDSVDNPLRGTGYVAHCINITSVLKNGEVVAQTTDHMRSEEDVPAADRSLYRHRETGPHRNHTIRQLHNCDYPANPTSTDTRCATWLAYYISVADTIDAIVAQHGGEEWHITSYAQWDLPAGRQGINIIYKAEEARPTWHNVLITSSTGYTTEGRHIRLLPWVLCNGKTWWRCVAGRDQSNRGLDLGVMQGTSPLPRVRGWIVQEKVDGDAPVYLNNALAKGGTLVHLANRFVWDMLNVAHWYGSDEHFTLRFARNYTIHTGVEMSQDWVMPFNTPALLCVGGLIPEHASVLDSVRAWERQCIWRNKDGQIVVGDDGPFSGVRESRTGLANYFSSLLRAGDTNALVDTLSRLARLADAAPFKESEEVRSGTPFKVKDVDIPVICTLLAGAHKPRLVSAAKAMKEACLRPLNAGDWKEIDQAIETGTWTSEEPEVIVTRQRLINPTTCTCLSVPMIGSRNPPLSDIDLYKIKQQTQHAGPARTMWFHEQTQQQQQLTQTKTSNITAARYTGPIAFGVTRDITSRLMRSLGESVAIDHGAQPGCTKDILLSHAMHGADKSMHAVLQRTHVPARMILLTWGPETCPPTVPYGGNFMLGRSAWDRDSPAELREVVQAQRVDYRTGNGHPTYICNSLDELVTTMKETMRRFRSRAATNNASPKQARSWEAILEAQGPEVFEPRTWQGDSIVGQAYSQPMISMGSHSTYYEPGYRSDSIKSEADIAYWNDRDQTGEIHLFLSPHPFRSTEQPGGTFTSSKATTTPLPHDARPMHTKMYGGELNCVTTRLGYAISYRKHKPPPNWSGEFGRTYFKAERNMMSASNRKDKLGFVTEDIVEWLRGRSGIKSIDNELDKIESEGIGLHPINALNVHRKLESLLKSAMKDQPIWKHNVRAIVWQQKGITALFAPAFLKAKQRLKELLRPEIVYADGLTRGELCDRVAHVPNEGVWLMENDLVQQDKQTDQDMIDCEFMVYRDWLGVDPHLLSLWRTAHNHWSIKGQHLRGVLDAMRQTGQATTALGNYLVNLMCHQRFVARLGQRLLLMLGLGDDNLSFIKGQPDTAGLKTEIKQYCNMQCTTSATTNGGVFLRHIAYRTEQGWGFGPDYVRLDKRYAVFNGNVQTDPAAVYGRIMSYCCMLGPTKAVKGIIALHHLPIEPEHDYDMALLVPAIAQQYSCSLEQVETHYSNLVHSMRAANTHIYSWQLTGTARL

SEQ ID NO: 1357 - protein, 3539 aa, Hymenoscyphus fraxineus endornavirus 1
MYNTNTTMTSTMTNTTPAATTNTHKRAIGALYKYTPLKNFSRGEYYDTNTETPLKQTNNAFKLKKPVKRINPLTVVTDPSAAVKIGGCTQVKASFNCWQCIFGYDLGIDTPVRMEMIKMTAECDPESASHIQVRAWLIGDMLHIANPIGLPVGPPSDELFKAQREFVSKPIDGCIKLTALVDLFDDGVLVGYAPTTLLDKLANDTGLQLSDINTNQFKNSISTMVNKRVSDPLTTFIGPPIILPSSCPDDLINDLNTEFGNMTFIRGNKEHHPHRYHNASRKAVTNLIYRWHGHRCLVYDIGGNPAAHLNAGRLNVHSVYSKSSAADNARHIKWVKQAVAWANRNVNSDNSDSTYRAIASSILTENNAMWCDKGVNGCVHASKDGSFAMSVDTLCHIEVDDLFDFYMKNKVIHAVHAFTIPKDYSYASSGALPYNEGHWYRNSSSWTIEFNGESLPYTQSTELTNKYLTIPLYTLGEMVVYCKIGGYKGAHMIIEHFVMPRSELDSLYIKHVTWFNTDMDELFVMIPKVNMDESNTLMGRTPYEMEKVVINVRFYERILNRLMQAYTWESLLSYGSGLIGRVYATSSGLHMKWNLTNTQVRQHCLIAYWTTNRLNESIRPLLAQAERNQRDPDFLTSLWNSLKTWVKDFGSQFDPSGNVILQKFIADNKGDTLRLVQLFNSSARSIESLNVATQMVHSRSVTDWIATSTGVTYNNQNFNIDKWRLSQPKLNYRPVVYDLVHFRGAKFLGDRVKCTPSNNCKHDHGIYHLHILNAIKKTGKCSCCNVESNLNRGGVCSCCSERSPCVGKNLRCPHEHNHSNDECCNKEVCFCNKPNSCNCCGMPSIYDHCEVCKFTPAAQSIGPIFGNPPTNGPNNLSKINHNVPNQAVNGPTNTTPPVTTTGLKTFAFVHGNTSNGTPHSQTPIPSSPVINPVAEPNDTVYKFNPAPTDSDAVNSEGSITPPVTERAKPLFDTTVSDFDALASKNWADDSDLEEIEYEQVNSSSIATKNDNEESMLPLVPEDEIIGAENISQIRCTNVTIVANRGYGPSNLSLLPPNYEGGLAVRVTGYTDVPGDGTCGAHALAKACELPIKSVKTWLGQAVNKDDWQDAEELGACAVAFGKNVIVVEEGITTLFRGSDSNVAGSIVFAEVITTGMHWVAGNCDIQSYSSLYNSKIRENYKALLSACQLTLDGSVSSAYAYHHSTMDIAQILDIDGQFSVDDTFVAIHNRGSKPKCTISNISNGIKYITGPTGSGKTTAAFNQIKGRVLIVTPLRSAVTSTYTFLKKKSVRVIGRADQAWLPPNTKENEVLNADVVILTMETLYSGIFLSGNKKNVYHNLVKSRHIICDEVHEISPHYARLIAFMPREKLYVCSATLPGIKTSYECQHDIDTCFAQKNYLKSYFDDAVKNNSIQKGECYIVPTVAQCSYANQPRHITSLNSKTMAQIDLNTVNCAIATNIVTTSVTLPNVIVMTDLGERTQYNMIFNPYKTEDPKKIRFANYTQRDYSWAEMCQSRGRIGRVKPGKFYGPPPTPSTQQSNVDEMLMSCYVGSGCNLTRIDSWKLLSRLHFNEIVDYFTPILTKLQDNDLSNQFQQWQDNYMELLACKDTGVSPVFVQDSVSKENVLSLISNFAGTLTTSVVRQGPMRYNCRIEWEHILPSQHYSKNDNIDFDNLTITIDSTANLINLNTDDNQTLSSKLRILAISQILTTIRGLRDRGQVLMNRNKWGDQTGQYIAYSNFQEAINLSGVKLGPTEIIGLLDSNANQLILTTYSKSTNWKDAVLIPNYRTNHYITMVSEASILRDNNIHVLTTLQNSTLIAGPSGSGKTTKMLENNPGTHVVTISNGQLYANPTWITPAQLPPNQEVVCVDEVGLMDVATLITICAKAKKIVCTGDIGQIVHNTNEEIKLFTGVNDTMELISEHMTVETLSGTWRFGETTCSMLRNLGFNVTANDKSKKDTVNGHVVNYNDLKSYGKLLIDTSPDAIICSTNKLARVLRSITKLPVFNITKCQGIEAPKTLVLLQDISAGSLADRDLYVALTRHSSELTIVVDPIRTSILTRLKVRSHDLISYANAAGGAGSMTLPMKEYLIRLMFRQMAEVRVVAEILGIITAWQGNIISNNTLLAHMDNLNDRNHSHFKFSEVGFDDKVGCDVVTLRLHKKQVVLFKSVHCTPSDNLLTCINQLPMGTLVSRALLRVPGAIINLSASLLRKIGFWLINLMSSVSHVLDKPVATVPEEIEMTSVGGKLDLTTIIWYALTGAKWAIVTLRSILLKARDTCYSWTNGNTAGAAVKKLMLNMLYDKDTNTFVGYTIGKKLKELLSILSSSAILAGKGLWTILCTIYKACVNGVKSMYTTAKNNAEWMRTSFLEIYIDESGSSDTDSFYMVPDITHLDDTWSDTEEVMKSLIPGDDQSMVDELVTEIEEHEEKLIAAQAAESAQQCEDNKVMDEVDMLFDFEEELLSVGTPPAEDDSQKATMPNVNIYDQISNDYTGAATPHGTQDSGADISQISPSPHDVEPVDGQDSHSNPQSTTHIERKRCKCSTIEDKWEYIQTLETEVNINTFTPNFFGRSVIQRNDKGLSVKLSMPLLPQLSMVTERCCDDDTHVVMATDKDGITYFKLVRCGEGYNLYVQPGSGKINPQMIARGLQYISKLGGSQGPSFMSLIKNMLSATKDFIDKLAILSKYKIRYALGQITMQSFSHDASCIHVYRAIRSSLPKSWFRSGIADLTIHSGTTISTIEIKSVDQVNSHKDILVVIYQFFSQTTVSVFCNTESRINFVGRVLRKPVDESISGGDKNAISALLQLGIDIRSIIERENDLTETDVMNWLVNNPLTSLFGVSSEPTYLSCKESLSVEKHLLDDFKYSLDIKGKEKVAFCIPSGHGKTTTVARIRREMPNHRVLDADEVQEQATILLLEFDDKMRNYREKIIKHIKSDGDYDALFIHSPMCAPPGYRPIVLMNSLAVVPADRIWSEKNVAHLNVNYTVHSVKGYNELFHTCRGYLERRLSGDITLEDGSTIIDNVNSILGDSFMRNAPFCDDILRLPSGKKDKLLYSEGVLGVGQQRVFKTGPHVEVMRPTINSVSTALPNAITTRLMGRVKYRTMDLKIHDYDALLSKMFAKDYKYKLRQYEEDTINLNYKDILAWLVNKGNKIELLDNMVRNVLKDEHATDPANISVHYKVENLMKEQVNDILDQVGRVIVWNNQNINMYACPVINEAKARFKTLLKSNVIYTDGMTIEEINNSISEYRGRWLLEMDLSKQDRQTDAQILKYEWDLMRRLGVPYDLIDFMTSFIPTFRIRGSGRESAKLPAIHFSGGAMTSLGNEIRNLLLLSDCLNSKFVAIYTLGDDSLVIMDTEPDLKFYSRVSRARHNVENTATASRTCALFLQLIVCRNSDDSFYCSHNFVRLREKIAYSSYPNTSSDWKMKYASYLMMIGYSTQTMEAMQWCGFVAFPTLGTTMSMRVSANAIYNEVSEEAILSVINDIINARHQESEAILLDVPMVLSGNKLLSGFKKAGDYVDNHVATYESIADYVNNVQS

SEQ ID NO: 1358 - protein, 3981 aa, Krauss' spikemoss associated endorna-like virus
MPIMSSQRTSHRTCGPSDRRGCDINLKNKKLSARHAQIYHVGMQPADNTIPELQLRHCKYTDYMYIDTFFGELADTEHTDCIGINGIINIYHNMKVYPCASKFTIDKFNGNTSCYINGKYFIDTKDPPAESDCNYCPKRYRRQVIAEVTKRGKQSMLQWLSEKSKTFPIGKMSQVFDGALETLPGWYIKCNCCDAMSYMPLSTLLPHTLTREQLVHVINILQCQTMNPDTGMLDLDPELYGFEASMLGFIFNNAKMYCYNCGAPMDEYTRFVPTEFKHLVPIPQDYGIHGISLEQAKLCLYLDKPPPESIDLARKLYTEMANNNINHQLSRLEIQYLNSVLDCINTDNYRLLQRHSGVVFNSNQNLMSANITQMELEEILLTAEFSVSAGGNIYAQPSNMNVYHSLYDITTAVTTSTWFSTTELMLNTQDPGENQVMLLNASTIFDVETAMLDESYVLVPIVREGDHVVQDSQYMYTESTGSNVPVRWNKKLINLVNGNCAVRLNGDTYNIQTIRNAEKLCIIKFTKTQTPDIRMLAGRRKLEVYLPVLDPNSILQTFGIVGAEWQYVSIDVDLTYRILINALSGKKSLDSILTYVAGIASTKYSIGGHIVDLTKTNIAEGVPELIYALIIMNDNNRLMEWCKLNYVSNVSITNATSRLYNFILNRFVRQIHLIDHPLINKINELIKTSATMMFKRDSILLKAHGSVNITNLLAFEIIDKIVDFHSTSSPVVRHPNNCHHHQLACNHMVDSNQCACCGYAAEPGSTHCACCATSRICLHKCNHRCLKPSDHMCYNCQVAKKRSHHVKCRCCSAMGCAELCTVCDNSESVELPPVYNKDHKIKPPQPPKTKPGLKEIKALTPPTTRKLEETGKRTIVTATGSKIGKKQHNVVTISTDETLIMAGNIKRLESFHDLMLVSVEGSMYFPYMPFYGERKLSREAFDNHIVQAAIETEDYCAYLCIVNQTSITLQELISQFGSNPSTNLSYLKHIIASLHLNCVISVNDNLSYLLRYGEQLQEYLHIVHSSALPDKFHHDHWFVGHPITLTKYPNGYWDAKDMAGVLDDPKPELNVDAMSIVEFTNYKNRMDKEYLTTTMTHRNDDVKRPSLIMFGNSTFLNNNEGRVHNLRQGKIHVEIPEKYTSYMELVFNATQRSVQMDALSIIIEKDEDIDIELDKTITHIIAQLYSALHSVDDPKAVKLNHSKISVVSTQLIIDNITRLKALDIVKVNYDDCTSEVAFATKLGSTVVIPNVKAGVVSYSTYKMSFGSLIRSLCALLGAYKNLGNFKSCKVAKCVNGIGGSGKTTLISKYADKAKWALVCKTRKPLEPFINCGFNYVGTLEQANIDRLRSNYLIIEEASMMTRVDLLTLCNVPHMVVECYGDKDQISIIDTSDTIGYRHRKSLLDLYQTDNLTHSFRYGNPLASEVLRIVYPDLTSEEGKVTNYTKLQSNELDEVRVFAIEYMIDAVYCFYDTHYQAITSLLADLEVNVYKIHADQGTQAKNALVIYWGKDTNVGSILTDRKYVTTAFTRATDNLYVLMHPDNTASIIDVVTATLSGAGSNYTEEFIDMENFRLKRELSTFEVMILNEFMKKNHSGVVVSVSRNCINISTKIILTNLSYDITLDGLVCNNLASRALINQFKARFTEVMSKQTDTTQKYRQIEVTLADTSLLSRFKRRAWFMSTYYSAKDIEELAKAKVTVSMPMQHNSNYALSMKAWGRHILLADYVLSASPTHTPIQVNTEFGNCDVKIFDGCSLYCGSIWQFDKTHIVYVSSAHSNSEGILTHLTANVRNFNGPKNHVKLVQRLLDDPASVLFPPLETNFVVSRIVERISNMLTTATTCDNPSLTAGTAFKATNQALIDEVSNEGCPAVFHWTPTHQRIKMVVCMDEDGHTVAYPGKRRISDTAHGLRMVLGVAGMEEVELNSLNRNKLDKMLVRKIKAEFSEVKSITIPTSVKEDFSNFINDNLNVVNVNSIDRPADDDTIGTIVNAVGMVLLDKLFRVPFADIKGVDATTIMLQNIEGYTIDGKTLDPKSKRLLENFTLGKLEALGDRLKKETNPDSKLHITQRIETLTQHGHLRNTKSAPVLFIGLTSDHNQIESYREVYFMHCTGPGAGVTTIDNVHYLSGSNGRYVSTTPPDRSATLYNFGNYALCKYTSAKPHVHHVKSYLTTNKIHRFRYPDRELADVHIPNNIYKRLLARSLASDCDFEDLLAYARSLCSTMIYTARGASMQYKMDQFDVQQYCIVVINIAMRNKKYLKSIEQFTKANVISEDSEFNKVFNTIKSVVVKELINYVTTSNTFEMFNEALTYQKNHLPSWFNSFIDVIKDVQIIKDQPVDHYVFYSAPTPFTPHSTGTPDHPDDDDYDTCEDEFDPNDNGDERGYYHYPEGQSNGGQSDGDEAIQPPTVDQKDPPRKTQYTREELEKFTIENIVTQLEKNPFPTDEELEILFQEPKPVDKGKKPMYSPPEVNLNLPEELPESSNKQSTRPEVPTHIVTIKDDRVVRKTNPHKVPVSLPPNKPTILLVYAGSNGDHLPMHGILSMVKDHMEVTIMAPADVAIPNYNLQVCTYVETYSTLTNAHTNNRTPDWSTIAEHTTKALRCVNCFKPNQFDYVVGLFFSAEAHLVHGRHMDVAVIPQFGPIMELDEFIRIGAFKQGLLNLVTGDSAVQVERVWSVPSFIVDHNNIGFPMQEDEFEMDANTNRVIEFCYRLNAQCTLVTFGSMVPDNYATRIQSICAGVAGPLLVITGGASKVNIPLKLRGIECNTRLSTQSQDMLIIPSAKHKLLKNFLFHAHIHGGAGTLITFMMLHVPITIYPIAFDQGRNAEWYNSIGRYISIDGDSITKELNYFREQCSALFNVPQGRKINVSFPLLHCVSPLIDDDTTIAPWNLRRVKVHKFHRVEIPQPSDCVLHSMLYCINDEATKIVVRKAYEDTASVCTICSIGDIIALCMIAKLQCLISAINGDTYYLTNPNIADCVSLLVNADATHCDALSNVEFDEESHDMTGNYNWQNCWYVLNDPTAVCTLEELTESVVMGKVGTLSHYFKQSFDARKLLLTAMRKANVISTYNTKAVNGGWILSDINIPIASWYCLTESGIIRAISLKNQLTNEHTIYHGRQYAVQCRNFIRVNTIAEVNVNQFFRNHLITGDVCAINAMTKKYCLSNGIHVVGTSIMDSDVLYIYSTWNRPHHHEKEREVIMTAKEIRVVPKQWGPISLQHLKREGKVRCIALRGIKRWCVELANHTDPLHPFFGNWDQLVTKYSGNTYVFNLKSDSQLFNLEKALLKVDDATCSYANVTARGVLENATIPELIRHFNITDEAWLTKKLQAWCTRHKKDYNTIKLRIVPIACSVETLFDVYQKTVWTINDNLIFAENLTCYTFEVTGTGWTESDWGSELFKFKSEDKFGVLQQPGNTGKSKRFSQVGIPRETMALTQFSTGDHRTPLELQACTLLNEHTADADFLTIYDANGVPGDIETIRADDIPDAKSMDYWDNEGMLDNTIHMPTSKFSIKSRVQPVGIGSSTKVRMEEYPVCARPSLTKAFAEELNSVTLRQGQHQDITKKPIVPKIEFALFKDNYYKPDHEALSRLYRSDVVGITYEGIRDWVKQHNYPDFVLKDIEKMIEESWELNRINTVLVHGKTEQTTKLNKLSRWYDEVNTRSIMAGSYAIAAIFSGFFTELKKRFKDALNEKVFYADGCTPQQLNRKVESVGHFKYVVEDDLEKQDAQTLHGVIEIEKLIYEDLGGDPDVIQFYLYCHHNWHWRGHGSSGLMDAMRLTGQCTTAIGNAITNLIVHGRFYARNERLIKLMMILGDDNAILSDHELNVQHHGTECKELFNIVSKVGQREKVGGFLSMLVHCIDGKASVCPHFRRLRHRFSVCNHTYSADEMSDKLDSRTLSYAVMLGNIKQSKTIAHQINQGINIPDWYDIYSAIQANALYDSSNEATVENHIAKLLQMMETRQPFIKEFKHWVEKDTQILKPRIKN

SEQ ID NO: 1359 - protein, 4977 aa, Lagenaria siceraria endornavirus-Hubei
MQMNTDAITPYKRKYKDKPLRLLNKEFSNHLQGWIKLPRNQSVTINKNPWIKSFQKLFKDKREHIFDNNKLKLVPAIRGERKIRDTVGTVATNVTYDDGLGNVINFNELHPMDVVKILYNVNCLGIELWKSDYYTIQDYIDKVKHLELDDDEKDEEDFLDEDDLDDKLIIKMVKPGRGNCTSEILLALDKILKRFGGFEGYYNYFLENHFKHFGYLECVDGSYDFHSVKFNPLKVCGVCGRVNHYNQFNRGLRQVHYSLSHYKQKSKAIKEDFLTEFDEHHKPTNIPWRCGYCFSDLNYVVLIEKYMMVKLIEYVCNHLFVLQGDIEQLMKIGYGDIYEDLDIKDKEAIKSHDEIVVNNYFYHSQRKIVTVGQDFDAASHRVINDVLGGCYFRPTSKLNSIKPEFIAELSTFSEIIERTLVGRDIVCLGNVLPGTNRTNVHNWYHNQTWFSKDPEVMCSSKGICGHNKNYFVYGNVGMMGQPLNNILNIVEGQRALQFITPIMTATRTLPDSTGMFQRTEDNLNFYLDGNPVPINFMTDTYNALNNYQIIKWDRKLFYVVEVKKLNLTRLMTIVGPFNDTIDYPRLMVDNERGIKIRIRLPDIDSFMGKTKGLNYQPKTFELNVNLFRYLCMRNLNRKVSHETLRPYAVGFSMRRFVVHNKVISNPTIAYEDLDMHIILSRVCMMKLKNCFEISHNYSKALKLLGPFRSMVGDMESALTASMIGLIGEILENTLGLKWDAVLSMLDGARLQSMLMGVGKEDFWEHLLQLTENITTVPPKILDMERHTEEEITFALQNCMHHSIECNHVRVKADNRCCCCNLPITDELFCNVVNPNPVSNEPYFTPNVYEVEPEREEQQIGNIEKDKIVDNLANRIMLAMRDTSIRDRRVQPKGPYKLPLEQPPVTKITPDNARITEKANVEESKPTVDIKVTKSKTSSFKSKTSSIGEPPQNAEGWQKVLRRGKEKPTDIANAILDNIMENAERLTISTDNVEAINMLGYDFVRHCCETVQYENDLNNGVNEIYYLPHLPTGSLILPRDSFEIIDKVYIPNSGPLTCAFDAYHFSTEPGSLQEMIDIVGAQPPFSTEHLSLYAKWRKDNIMILDDNHVHVEKHNESSNTFAVIQFEHGETNADIGHFLPVTIKRVKPTPIYFYHRDPNAIVERDHIVKNRYGKMYSSTCLPTWSPKDNLSCEITYHNITVDVRVSEAIKPLKLEKIENEWYLTNNLETRLHLIDKEKIHAKLPKIFEKYISKIEYGLALKLPSNEIEEYRHIDKELPVNYETELEAELLEILRVFARLSELAGQVPFRDIKQTHQGHISSWFGKSKFSIPGGKTHKMKKMDVVMLKIQGKWIKSTIVGFDRNNPVLDYVAVCEQRASLVELKESMGSQIRELVGLCQSYVDLKTLKSKLAEAKFLTGPAGFGKSTKIGQSAVPGDLCVAMTTSAVKALQEKVTRGVKVMTLERALYSHAKTGQTLFVDEATMVNWLFLGHLITDQSRIELFGAENQIGKRDMSKTPGIRYNITLSDFVKPENKITEHHTYRIGEPLVTLLRSVEPKLMTKASHKTTYTITVLDPAMVENINNIVKDRKPEVIITPYSYNRNLIEQFLKHERVPVVTTHAYQGVEVSRSMVVLKADAGNRWDLNGHPEYLNSALTRAKYHVDIIIYGNYTDVKSLEDIMTQVGGMDYEYLQYFNENIESATTEIAEVNQSNETNKGDKLTLKTGTALPDVITINTMHELSEEMVNQLNELNISMQGAKLTYQKLHEGTSVTTQFAGATVSKVTNINGIVNVDANPIIKSKIMQNLDTPIDVPELIKEQVDGKSQSIECKMTLRQTNKIRELTWILDKTIDRELKCTINGVNIKMTKTASCPLFAGVTFETDTEKLTVSNGWYHVTNRKVTINKERFYPGLTPIIRWLQLDIKELILDSNTNIGWLQVLKGDMAHFLWQLKERATQVHLWLLNFLTETDSPKCYYNNIINTAKYNKAARSINQPMVTNHPSVADHLNYIIKKQSWIKKHDTYILTNGNQVIIDITSNEEEAKWEIFAVECLADMVKTGTGMQGIAAAELDIPGLMIPLHKHLALGTTVQTIINNNLLNLNKQTRPGVYDVIRLDKQNYAMQKHYLKHRYPRMTITSGNYEIINSGIELALEQILLNMRGGLTENSTGIVAYCGLCPISICMTGKYYIKIVLPDVNSNIRFMYDMQKPQIDSMLDNFNAKRDAKTELYWDHETKCERILAGTSIYSLTLEEILYLLDKAHCMYGWIPTFARDTDEYVYDRQLYCYGYRGGRVTNKIRNDIIDKVNKGEPILIKYDKNEYLEATVVTEVFNHRLIKLQFKPIPVCNYIDRRLGTYMDINNIIKIKIPWIDLDLFRVLKDRQIITIKELTINKRFLRNILLRLMTGDDTPHGALEYAKTLESTQVITEKGIDDLTASNLLVTLNTTWYAIYIHNNYLEKFKTLIHYLNYTDGRPVAVLMLEQILTGIGNLMGMVSDKVSDIAEQFITYLNKNYNLTNKMADCIREAEKTNWTPETKQVYFNRFYFSKDDEFTLRSWMTGDDDNNDDDDDAGKDDDNVTEDNNDIITTDSTSLPNIGYEGPGTSANAEDVGTSTTELQESSTSTTTNDSDDRIRKLMIQPGKPYKNTRLPIQVMRFVDEKGATIISRKQTIGVLKTLQLYGDFNEEQLIKAAKLIDEDYMVHRDLLHAPWNLKTLSAKVEDALGVSLERKYNEEEPSKYNIQLYSASSGRDINISYSEHFMIPKIIWFYWHETSVPELIMRCINSWATFNDSYMIVVLTKQELSQLIPKEITDYVENTTPQFASDWVRTFVLSRFGGVWADASIICTGTIDRLVERTLQNTIGLLQISLGSKQVKIKTSENWFIISSTYNPIITMWNNILTDLMKETKPSGEGCSVWIKKKYPSEYSKITKTMAADSVDYLRSYVLESIVSQITGLFPETICKDEGQLTTFDDLPHSNWDTLLDQYTTKTKRPDLIIPLVKMIDSHRIIITDALLDGIKPETGSLLHEIYGMDFNLKLHTLQQVQERLSRAIKENFEPVKKEFELTRGLQIFKTEFSYGMAKLTSMLNNSMTVQEIQMVRPALEFLVKSGCHLYITEEELVIMLGMVLGKMKHMKDLREETQIWVVLEHITDTKQIDLEKWFETNELTTMRLNVSNRLPTKPDYVTHGNRRIPKIVWSYWDKTEVAEFQVKMINNWYYHNQDYRIIILNEDTLLKMVGKNTHALLMRQTPQFRSDWVRLFILSNFGGVWVDFSGLFTKSIHNLVEATVKNSAGYCQISLNKRTDKKIVLESWLIICVENCKTIQSWFDETKEMTKFVDPSGYNALEWMTSTYGSEYQLAKEYILPNLRTYLRVYIIQVIVRLRVKDDPVIIYSDEANVSMFHNLSANAWLNLWDYVATKPKVEIDVGVPFIKWIGIQRSIIIENYNCHHHNITPISLLGEELNYPSITYNVMSNAELTLPNREGSTTKKTNNIIINKYTNCKTLLICVGSAGDVLQFKTIYEIADSEGQSPVIITHKDHSKYFENKKAHYFDVESEELMALVNIVLNEVDLWMDIKASHLVRQISDDITAIARNYEQIIEKVIVNSAVPNLTELGKMLPCDWLEVSTFTDNVVFNPKKTTGLKGSILRAKEWLHHNIIKSELKEENVRSLRKFCSGYPLFYPYVMSVCGPLTIWSMPSNHNEMIMSEQDVLITFGSCDNTITTKSKIKLIENFIDCGYRVTYHDKYQIAVPGSVLFNAMEQYPGKFGIVNNYDLRSVKGGKFVLVTHGGHGTIMEALLTNCKIMIHPIIADQFSICDTMVQQRMAVKLTDITNVNDCRQAIAGLNRLIDTTLAVKPVISVFFKPLIFWLKPEYKIDSPDETLKILDDAEVMGDYDNVGSGIYRILDVEHQILYDPQVPNRCVTHSLEYMLQGSGQEKYLTCNTIAVMRLQQHSVTEQELIDGVLSMGVNVILVYSNGTGLVVKTMNGPTMCFYVDRSRTPWHVCAARLVKHGEVIDLMKRNAFIRELPHSIDYEINELHKNFSTAMLCIPKLMAQQFGKSFFKNFLARTKSTNLQVLSSRTDLHVAYITIKQHFDAWIGDTIYPDTPLGVGWVITAQGWVLANYFIKDGIIVVFSDDGILEQTILINLHLQYPVERSKSVILSTKQELVSLNKPTIMYTTLNHCVPRSSNLVSNFHKQNILIVADFDNRKHHMFDEMDMIKRAAKVIFHTNKQIKVEDLASSHNAPLNRMVIKQGKVLYEHEFEEKMRQRQVVKLFGLNVMSEQQCITASPLTEEQINYIYKYFVKSGNKLVAIDNESYNDKEIKPSDWVITLIQNSEVMSNDVINNLIKLVKEHSMWHIYDQHNYELSMTQAGDVVTLEHGDLWVKSYGIVLVYVRVGGQRERLSWKLDTDSAQINNPKPGDWWGLETKTQTKVNSNFKNVLAINELKYHEPETLLVDGSNVVESDDLLDMYIPPYHYGYTGSVIEPLLDFPDNIAMQLWEDTDQTDWLSLYAPSNQCQLKSRELPGKIIQTEKITLTKWPIRSRAVLTKVCFEEGRSILGRMKSVAFIRTVTPDPYKLVMDMADTYFIKGWVTKVNEFRAKRLVILPEDVKRWVETNKDAKRIEPELLELLSGEILVKPMNDVNIHLKLESLLKDNTTIMTKQQQARIIVWQRKAVCAIYSNLFVKVKDRLKSILHDKIIYADGLRPDEISARVRLCKDIAGFFENDLTKQDRQTDAPIITTEMYMYDLLGVHPNVIASWREMHEVWRFKSNHYWGQGQGMRLTGQATTAIGNCITNLQVHQEFVKKNFSILELALFLGDDMCMVFREKPDTKNLRKNIATKFNMQSKDAWYRNGATFCSMVMSRTPTGAELCPDVVRLKFRYEVTNGVHEANAENILMRKASYIMMLGEGPNVKETVTKLNLPIKPLVWYDFESMLRAVGDKYDMSHVQVLDVYYNLLQMLNSEKLYRHTFRHFSNIEGK

SEQ ID NO: 1360 - protein, 5363 aa, Lonicera maackii endornavirus
MSNDPAKVTSTSHTKLTEPSPTEVPLLKEKKWSRPSVDLGIDLDKPIKRDLMTTGAIDCFLTGGITTKPVVKSGKSNLDRFNEMSSTLFRSGMHTSKNFSKTAEFGGGLFGQKKSLNATIHRVDLKFCHTQRRVLEDITKTKPQQPRGFNLAKLKDKFCCNASADSNGKLILVCGDCEKCKINNNMGNKERLPRGRFRVRPLTKYNGTETTEKPQEKRSQAVKERFVKYCRPIYKLLKKNEETPVTFSNDRLLATGIYGTTNATVNKESDMLGRDMGLCIDICKPGLGMINYVKYGYKNKLLTHYITSKDYEQYKKWLKEGMKDKTLKITAESLKRCTHLYPKDDNRHIGGNLLYKAIMLLIQTIKPQNLKRLVTSETGLTMKRVGKKTVMKLPKMEHRITDGYDGKEFGTAMQGHLMTRETVKAIDGPMLDRVYGHKCKYCKGVTIITNGHTGTNYNMAATVTRGRILNAIKYAVSSDKPLAELYLATSIVRDYSKHGLNRINDNHMETHCGFCGHDIIEDPPSLIENIEKLFVVHHVDVKMGLLHQLERMGYLDGSTLDATGEKNIIQQDLITLKHQLSRMRQDVVLLPSSMSSEALTTLNRVLMELEMRTDVVPRINESCTLGTTRALLSLASSMNEYQNTYLYGDCDLVIENAKCSNLWQFRPQLYYNKVGETYEKINKKNENNILLFDLNILRVDPAELVTTLISNGVETMYYIVPKITSNHVRDTKVCEGELQVRPTEDAIYIIPSWSDRPIRCDRDVALTWMHADYIITNERCCSITTERFANGLCLKKFEMQLAQLDSIPKQVATVADTISLTMPTLRVFESKGKFKFSMCGERTVLLNRELYRRMMIRNISGTNSYKELVDYGLGVANMKYNINDTVISFSDINHNIIKHTAAFVYSKMITKNNVNILTEKLIANINTIDGFVACFVINSMDVIINLANLDTNIISNIKHWLKEKSTQTKIKGIASHIDGLDIDNLMCYAREPVIKEYRGIKLKLNYKQAQCEHDVEDETSIRGKKCECCNIKNVKPDEKFCVACDEHSDHKCEHKCRMNHKVESLVICSCCNCKMTGSECECCKDVGQLEQIITSVPDSVEEIAEEKYKRTNKHHMLKKQKIKSTPDSKLKSAVAEPDMKIQLTDELMSKMVDNITIDAELKRISMAEKEKKIANLKEKYEIVGTEDIDKKTTIGDLLEVVSKDDESMELWIRLCAKTNEFYADLFLYGSEEGWARNALKAQPPNLATMESYLTFIPMGDTIIRNENIKIEKTYEASGSGNLCGLHSLQILYPEKNFRLEDLQAVCSNTANFTSDDLMKFALVNNLNLIVVNESISNITKSIEDDKFKAIIHSKAMGINIDHWQPGVITQTGLHVGLPYYPNHFSYEDRLKNCKKNGMDRRSLMTKELGNINLLKLEVNLFESLVETNLNPAERMFTITSGADEMTLSNNKQKKMEPNNGLFSVKVNKENIDLCEKIVNCLMRPSDFIGDDWFYDRSDEVPADATEGIRNLIEQNIRELAQIMEASKNEYYNPSLVSTHTTIQYEKMRDNLFKISGSVNLKPGDCIIGTVTGIKEEKYVESKVIGYVLRQMGEWSICSCQKCPKGTRIKVKVLKKNTGSIYRFLFSALRWDFRRDMKEVIAKAVGVDAVAGWGKTTEIRNISDNTTTIVAQTRAAVNNLKEKSVKAHSIISAEKAMIEKVKTKRLIIDEASMITWETLSIMMGKEVDEVMLYGNTKQICVVDMFSTQGLRSSKSILNQCKNIITHYESRRIGNPLAEELSLFDKSFSTQADHSTEFSTISWTDMKWDELNKIVETVETCSILCFYNNAVRLVTNKLRYKCPVSTIHKFQGLEDDNIIVLQWCPQGNYPGRITLDANRCFSAATRATKRLIWISVNEYSNQVPLHNRFGSSSGGNEGKIREQVNINDYIVRIASSMVSKVILYSKDKTVERLNECLEHYKLEGSRKLVKQTVTDNDIDYLEIKPEDMKDQTITSPFKKSLRAMFKSSKKVDSKKTRLNKLLEYSQGQNLNKYKLDDGIIKMYQATKESCEKAGKDFKTTFLPIMEEMFKVDNSVVDIKSNFDNELEVLTIEASVLKIKQVTIRMDYKNGVGKVFTGKTSIVDKTDARFSKLFDPIHKCKSYHILKNKNLKKDIRVKKTQHLEKILWVVNHFGVALESGNLTMEVRINGLTYILASYGGCSLCGGMIVYCNGKMILVIEPSYNTGDERKILFDNWSDWVLSPILSHFKLYDVMDALALQYEEPPYFVKSDIDSIIKGNVMTALVFERMVKLPWVIISKLKGIIKGKTGDLCDFYDNSYNERIQNMVRKLRAMGFNNINTGLCEISYTNIQSRPVVATFDGTYYTCFMDQDGTISVYTEETTANTMLPEVIKLSKYDMKKKIIKSIMTGVEFWMTNCRVDEEVEMGMIRKSGALLRPMSEHMQQNTMVAAAAKKFRGQVEAKIMKMRVGKIYFTQKMMADYEFLSSHLSRYYNVFAIATLYPENNLHGMVEMLLAQSLYHSGYTDTLYITSNASTTVVCGLWSWFAKPSDNKYIESKFLSSRRYAIGNLANIIRIYQSDIESLEKREQLSDEEKKELLEKKAEVQAIRDQIEGNNEQWYGTDAGGKTFKNVVVSMENSNIKLSELIKISTDNNIKTITLLLPATMVVSETSLHKVEVFGNDQVMVSFKDSREVIQPNKQIVNMVNNGSAIDHSDHIITSHTKSIMYGIQVVDLTIEKKEKTLGNDARIFSPFRNGLEVEKVWIQYPSVNINLMTGDSSKLIITKHKKLVSKKLVLKLYERALRDDCNLSDLQAYGRSYLQTQMYTEKYVTTINKDGLDELNAACMVAIAEKNGLNDQLDATMKLIEKFKVNNDDCIQKILMKGNAKSLLELVNKNMAKLQDYVGIPDNFSELLKKLNSNMSATFIDEESGRTQTWGHNKEVTLSNVFKEWWNTNTENLEWINVGYVDDYRRIVRRSKRRKPKQSKTGGTSDYIKLMTGSQTQRLMRQSDWDARSTALPEPIAGIGESDVETMLTRGSMIAKSSNQPHISGYKMVKAKSKLSSIGFKTIRSFINRAAEVLGVIQNLDANDVKTIFSLVKQSLMEGSVNNAEGWKIAEDLRSLLDLDALTTDEVAAILSSMEKMSDKFLLTDSRNVGWSAVDWIKSSDNISDLTDEQIGMVLNLKKIDKLNDIKQNIVTDEDGNYLTKEDAIKLRCKLRNQWSQTNTGTVNSIGVKLSVHNLLKELNHSEISGLENKRRKERMWLDMASVPNNQILRVSTENMAITYEPVDTSTCVWDCIEQYFKRKVAASFKLNASIKAIMGNKKQLTTKECVTLCGLLCRNCIMFTEDGSGMAYINDNHWETITLMRVAQPGMVDHCVLVEVERITITGFKADLVPATIEPLVSKSRCHIDDKDRLDLVDTTKSCLNHVHVDGEGINLQMNRCFTDGVVELAECKLVMPPLNNLIPRLTRKVMCNYLIERVRVKYEAVNEDGKTVVRTEENWYESGSANTTKPGDGLLISSQGGYKLVMCLATAQGDVDDGFKKYVRLTEDHGQMAVVFDCGYHMIEKKLRVLTSRPTNTDNKVWALNIESQKYVENSLGLRTAVGAGEGILHIYHYDNKSHHKYNEKNILDNFGIDQMVIHSVVGKDEINWNYKALLKDRSTFRAAVLYGVPTMIMYCETDDETNIAEWWFKYLKKDILKDRRLVFSYNIDSVNEIRKINELYELYSEESKNNNTIIRYNESDMDTMDVEDVINEVSYYGDDDSTLRALLISLSTNLMHETGDLVYYQLRKLIEPLQVNDDDLLLTSGIITNGADRLNHVQPWSDITIIPLNGRNINDINYEFERERSLDDDENSKSGDESEIDESVSASKSGLLELEASGGTKGDDTIRGIETSTTSKKQMMVKTVHEFVKRYKPDVSNSANWPERVQQLTGAPSSTLSDTTLVEPYTKVTVNTDIVDEFGSVRQNVKSNRRWYVQYGRLSLYNPCWWYLAIPEMRELQQYKTKHNIKIKMNYLGHNVYRLNRIRFREKDSIFTHCVKPEVFFDILKHNSNNQLEFPKELQDIANQYLHGRVSWHVIFGKDYNKTFEPTCRRLIQKFEKVIVLTDYPYSYNGICEDANLASKLVLIKLASQSEPCRAIWWRFSILYADIPDDCELYILNGRDMTEDEFTMIDILMEEDMEGFDIVSALHSQTFNVCCGYAKYNHRVFNDYATFRDIYDKYGNSYGGDEIFMSRFHIKMMWLHYLIHGVLCYQVEGKWLNYANNTTFIIEVTKGTRIRIDGVTGLFCTANFFEVNHESKGIYDYTSIGWTVDGILWKRGLQDCAERLDDQKIKWWLNKENVISKQIDSQAKLNQSVQVRELIFNSNAESVDELVVELVENVDNCLITIRNVAESSIKISSTDQLLLVRIRISKEVIEIDGSIDQSTKNFLNNQTMWVNTDRVHVGWSAELVKLVQSRYKGKVIVVEGMVTKMVDLMLEPQFGSGVHIGKEIDELIWLPKNVDTELLKLQNLELQVKKGKLTLGSTDEKLYNILRLADVNAWRYWLETGNTQRLLSFDSRIVRSHSECVPTDLGSMVGQKLPLSQVLQKTLAECANHVDLNDSVWRKMVKRDSSTVLIDSIKDTVLTTGKINCVQRSSSKSVIILCQGISVTIVNQSSGGGDVTTSVETVDEAKQIYTTWNSLVESGKSNQLPFGMSPTAYQEKFLNVKKTTLSQQDKLNQLEHFDFVDAYALLDHNITDLVPKVGIEAYDLIPDSIKTDYELIEPIGGDLNINAELGESRNRDVNARIIDLWEDTDLREWITMYGPRNKVTVHSRVDPGPEKINIKTILGSHPAYSRPVVSKTIGMEFNAVTGRLGNMLLLRKEKINIQHEIRKFRSAYYRPDWQELVASYKNDTVTINDKDIKMWLSKRKDWLSLATTTLRLLESGLSHNPMNKVNVHVKTESLLKSNPIDNWRKTQGRIIVWQPKELCALMSPAFITIKKRLKEILRDGVLYTDGLTPDMLSSRLRTIQFDYIFEDDLEKQDRQTDQELIDLEFELMLELGLDIKLANLWRLVHNRWRYKGKESWGQLDAMRLTGQATTALGNAITNLCVHSSFVIEHKHAIKLVMILGDDNIMFLNEKPSLVKYKRLMSDRYNMVSKPNIDPNVGTFCSLICYRNSFGSAELGPDLIRLKRRFEVTGGGNQYELPIEVVQVKKIDDSYKTKYYNGRYILNLTDEFKNGNLNVWATNHGNRSYIAILEIDTDLKLDDKAYRKHDLRDKNPEETYKTLIKIGESMGMANAIMAGGMSYLHMIGSTKETEDINRRKGYGLLLTKWYDVLSCKNAICSKYGMSPTELDENLRDLLEMLDKPLVTHKRFKTISNFLQ

SEQ ID NO: 1361 - protein, 2721 aa, Macrophomina phaseolina endornavirus 1
MRKNLTHTNKPSEQATRQPPPFRRPRGADEIRMEKMRALVRRAGDWWHDDTLPVVTAMTADDLDIPLCEGWDPLRLTAGLLPGPADEALWGCQWGSGSLAALRVAVALHQAGDRYLTAERAFEPNACYGWVVKACDCWKEVPGMACCCWDPVVISKYPEDSAPEAREDGLKWALAMLNWAGWPRAAVHAEQDAYGSECSRLHKLDGRWQVHGLSGSAVACLSCNAINVLMPGESREIVCGACACEMLLNFDPLKLSLDRAILFWPGWWLELVDRAVRIRVSNYPEWNRTRAGHLRDLLAGAIGDRADAIIAGTKLGKVLDARDEATARKIIQMSAGREVHVDGAMSEDILKDLVRTFPDYEIIPTLSSPHKHGFHHACRVMLEDRFLRRIGTHVPVYDVGGAVHRHVRRKRFNVHSCRPILSPDDYARHAEHNADTSNMLGNHARKAAQDTAGRPVSTWGPVEQWALNARTPKLVACESPAEACTFRAKVPGALLYVDSLYDVRPETVLAQMCNHNANRFLACMTIPPAVWSDTSGWLAHNEGRWVLRDEWLHLSFRGSSQTYRNNFNNARLFFENPVWLAKSAGLYIRVQGYYGDHVCLEGFGGPIEYFSANLQYFTMWFDEDTDTARFTIPRPSTWMDALKQVAKPDQGFKVNRKFLELVRSRLLANPKTDVDSVLAFARAAQNAQYHLSSGRMSRFRLSTDEVVDHVIVALVLHAKILERIEPYKAGPRKVDVWDKLKKIAIDSTREVVQAGADANPLVQAGLEWLRNWLFSGQENVVQDANWAVYWQLRDFVDETWCSRTYRRGVVRGLELTEDKCPPRPETIHFGRGPWVLHEGEFGDGVSVRRLAQPASELSVEAEVQAATTSWVHQIRARREGQPAPRERDHAGRPEPRPVQPGMDGDTPTGDFTVTSDRIELHDSEEELVASAPFEVLHGLVDRSGAAADGATLHEELRHVGADDSVTEGPELSATLSGVSAAPVAEHQHETFSVPEAEETTEMAADGEAPTAVAADWPVEALPDDTTFGLGTDQHGVVGNAQHRSLGLETERARKIALYGAKVPATVLTWMLEGPTRLRISWTSQLGRVESGPTGHWLLDRLSLLNREPTPGDGLCGMHAVHFFAPDLDKGQLEIMSGRKEWWSADELGSWANAGGYNLVAVTHPGRGEAWICSADAPVVAVVHSNAIGGMGQHWESARVLVDEVPVNSRVINPRLDEDGRRAQAYSRAAAELWQISPDEVELDGAPSLELIERAESSLQAQWEAARFVCKPDGDAVAGLLVFEQDEERIFRVCSSDAHSDASMLNSMLQGLEPLPDPQVVFGTDTLDEAVAKIRCNVGRAIIGQARGEAATGPTYHPGPVGAALDWLADHGVKPGDALLVDGNVRFAQGSVGRPAAQLPAREWRLYTNSLVSLIKRWVACGATSGDWGKVDRTLGGPGSGKTRALHESDLPWSVVVPTRRLKTKLIQSLRGRGSVHTVEEALCLPSDKGRRIWLDEAGSVSGDDATILCGKFGPMMLSGDPDQIGPVTEPTVATPWEEWAGDALERLPVSGAVVKLAGTRMPGSVERFLLLPDGGKAGTLTVQKLRNEQAVREALVRLDRAGTLVLVFRTSELKRVRTLHLDADVEKVHSFQGGERERVIVVQLRASGVSGDPRYLYSAFTRACRELIVLTLADTTDTEVQRLGYMALTETRGGWLPGCFPQHVESLLRLACWNEWLLLDATGLKLGPWGPVPWLSKAARMMHGALQTLNDWIEWCAPVRDDGHGEAKSSRDSTAVVGPARTEWPAMPDHSLWEGLRPALAAGADTVSNPIVRMAVDGTVVVASADDPSPPPRASVADRLRFLMGENLPYPANEPQGKEEEQQLRCVSPRPLSEAEDVERELRGLELAMPARRITTKEWESLALPRVWRTEALDWLEGTTGEAVWRSLPAGLVVLYHNEELSVWADLECPVELSAFVVLTLLEVAGSRQAGAKAPRGAGPWFSLALSFLGMMVYVAALTLVSSFVASWAHRLSQTPMREWGPALPRRRDIWLWVQSLKLRAGFARVWVPASWKDGTPMREMPRDWLSLTAAELAVACQRSTTHGSYTMAGVRVVVTPRREEGAYTIVLADAGDEGCAWRVRVSSTACSVHVILCRTHDHACEPAMLQALRLTTSDSDAPLRGGGKAELVSRWSPWTPFPEERHTGASETWSWVTGAVAASIGVGSVPLGPTEAGTRHPEITGDSGDPHKQPVSDSKLEITTAMDWLDSTQVLELAPISAPQHGSIRADMWAFKPQQAAIITLGGMSDHSRPALVRLYSAVFNAVSRRLFATKRYRVNALDTLSHVARMGRVYCQGASWKVAAEPVALDEEATVAWVEAADNPQALAKEMQAVCERAFLTTGLDHATVFAKRETLTKEALKDSSLDGMARVIVFHSRAVAAVMSPPFMQLKDRLKNRLLDHIVYVDGTRFDEVEALVRNTKARYVLSNDLEKQDAQTDADQINVEMAIYEQLGVDSALLNLWRLCHEQWHLSGPAGMSAKRNGMRWTGQATTALGNAINDLCINCKVVERLGSALKLMIFLGDDNTMFVDQVVDLSDLMALTKAEHNTVCTPTFSESYGSFCTLLISRQGESGWRVYPDLARLIDRVRVLPSMAVEMGDVEARLLSYCHLIGGIPSVVELCKEKGWPEPPLAPYGEAELLAAQPERDISWHSGPSALAAFVELVRNPDVQRHEYTVLRTKEL

SEQ ID NO: 1362 - protein, 2706 aa, Macrophomina phaseolina endornavirus 2
MTRNEHTNKPSAAAFFQPPPFRRSTRAGEIRQQKLRALVRRSGDWWHNDVLPAVTAMTADDLDIPLCEGWDPARLTAGLLPGPADEALWGCQWGSGSLAALRVAVALHQAGDRYLTAERPFDNATQFGWSVTACECWLEVPGMACMCWDPVIVSKYPEDSPEELRADGLRWAVAMLDWAGWPRSAVHAEQDAYKSECSRVHKREGKWHIHGLNGTAIACLSCDAVNVLMPGESREIVCGACACEMLLNFDPLKLTIDHFTLFWPGWWHELQDRAVHIRVSNYPEWNRTRAGHLRDLLAGAIGDRADAIITGTKLGKVLDARDEAMARKIIQMSAGREVHVDGAMSEDILKDLVRTFPDYEIIPTLSSPHKHGFHHACRVMLEDRFLRRVGNHVPVVDVGGAAHRHVRRKRFNVHSCRPILSPDDYARHAEHNADISNMLGNHARKAAQDTAGKPVASWGPVERWALDARTPKLVACESAAETCTFRGSIPGALLYVDSLYDVRPETVLAHMCNHNANRFLACMTIPPAVWSETSGWLAHNEGRWVLKDEWLHLSFRGSSQTYRNNFNNARLFFENPIWLARTAGLYIRVQGYYGDHVCLEGFGGPVEYFSANFQYFTMWFDEDTDTARFTIPRPSTWMDALKQVAKPDQGFKVNRKFLELIRSRLLANPKTDVDSVLAFARAAQNAQYHLSSGRMSRFRLTTDEVVDHVIVALVLHAKILERIEPYKAGPRKVDVWDKLKKIAIDSTREVVQAGADANPLVRAGLEWLRNWLFSGQENVVQDANWAVYWQLRDFVDETWCSRTYRRGVVRGVELTADVCPPRPEAVHFGTGPWTLDQGEFGSGVSVRHLSQPVRELNVEAEVQAATVSWVHQMRTHRESGRTESGFNVVRQRDPETGLPADAAHDEGLDETMPDIFTDDRIELKDAEEELVASAPFDALRAAVERAEHSQPPEVHDLPATRGELGSGAEPGANANVADAQDTDAVLPLQEGSVPPPPQEDDWPVVPIVDDHTFGLGADAPGATGSAQHKHLGVDTERARKLAAFSERVPAHIMSWMLDGPRRLTVRSYGANLEMASGEPGHWLLDRLSLVNREPTAGDGLCGMHAVHFFAPDLDRDSLIRSSGRREWWSAEELGSWANSGGWNLVAVTRPGAGEAWICDPSGPVAAIVHSEAIGGLGQHWEACRVLVDEVPVNARVISPALDPDGRRALAYSRAAAELWGVPVSEVELDGPPSLELIERAETTLQEQWEHARFVVKPDGEALAGLLLYEKDEVRIFRCSSSDAHARASELNSMLQGLEPLPQAGVVLGTDTLLEASEKIRANVARAIIGQVRGDATTGPHLFPRASAVSLDWLADHGVKPGDAILVDGEVRFVQGTIGRPAAPMNVGEWKLFTNSLVSLIKRWVASFEATGEWGTIHRTLGGPGSGKTRALLTADSPWTAIVPTRRLKVRLAQQRKGRGAVFTVEEALCLPADKGRLVWIDEAGSVSGDDATLIKGKFGTMMLSGDPDQIGPVLEHTIATPWEEWAGDALERLPCSGETVRLAGTRMPGSVERFLLLPDGGKAGTLTVQKVRNESGLHQALVRLDRPGSLVLVFRTSELKRLRSLHLDADVEKAHTFQGGERERVIVVQTRTSGVSGDPRYLYSAMSRASRELIVLTMADVTDKDVQRLHYTALFENRGGWLPGRLPRPAEALLRFACWNGWLLLSPTSADLGYAAAGEWCNEALRVLLPALATLTRWLRWVAGTPPATDVLRSSTSPAPAADSGALLGPARSEWPPMREHSLWEGLRPSLAANADTVTNPIVRLGVDGRVTVASADDPSPPPRSAVQDRLKFLMGEPLPYDAPGDAEPLRSVSPRPEPTDDDLDADLRGLELAMPNRQCSEGQWRNLKLPASWRTQALDWMEGTSNGAEWRSLEHGLVVLYRDGEISVWADLACPVELAGFIVVWLLETVEPRGGAKPKAGAGPWLSLAMSFLGMMVYVAALTLVSSFVASWAHRLSQTPMHEWGPRLPRGTEVWRWIQGLKLRLGLGRVWVPKSWKSGETLRDMPREWLALTSAELAVAAQRTEKYGYYTMGGVRVIVTPRREQGAYTLVLDRPSVTDCAWRVRVSGMAASVHLVHCRLSDEACEGLVLQALRLTTNSEDAPLRGGGKAELVSRWSPWAPFPNEPHTGASETWSWITGAVAASVGVGSTPLGPTEEGTCHPEVTLGSDDPHPQPGVDSKLPLTVAMDWLDSTQLLELAPVTAPERGSIRADLWAVKEQKAAIITLGDMSDHSRPALVRLYSAVFNAVSRRLFATKRYRVNSLDTLSHVARMGRVYCKGESWRVAADPVALDEEATVAWVESARDPQSLAKEMQAVCERAFLTTGLDHATVFAKRETLTKEALKDSSLDGMARVIVFHSRAVAAIMSPPFMQLKGRFKNRLLDHITYVDGMRFDEVEALVRDTRAKYVLSNDLEKQDAQTDADQIQVEMAIYEQLGVDSALLNLWRLCHDKWHLSGPAGMSAKRNGMRWTGQATTALGNAINDLCINCKTVERLGPALKLMIFLGDDNTMFVDQVVDLTDLMALTRAEHNTVCTPTFSDSYGSFCTLLISRQGELGWRVYPDLARLIDRVRVLPAMHIEMADIEARLLSYCHLIGGVRSVVDLCEEKGWPVPPTAPYGEAELLAAQPERDVTWHSGQSALTAFVELVRKPSVHRHEYTVLRTKEL

SEQ ID NO: 1363 - protein, 5447 aa, Morchella importuna endornavirus 1
MPSRANNTTYRMFIKHTKFYKNKPFCGFKNTADKQLSKTILRQQRRSILLKRTSWRPKAVRRMEKNLKIQAEKEKAEKLRQELLKIAHEEKLKIAEMKQAIERVILEEQNQEKRNSLNTHLQNKQNTINYAHTPVSSIDGKLTGTCNDGKTCIIDNNEEHKVCLVCKKLLVVGSKPEPVVEEIKPAAEPKIGGKADCWSHLPIDIHKRGWAIASGAPFKFNVGSKKHQHSMMAKYPDDPMPISEIVNDLSYMLKNSMAKRKYLNTKYLDLILLDNGDYHLEEGDTYHAGDVYEILKAKWDSVKDNVKPIQPTQLLGGEENCYLALPISPRSMRIKHTKRIMKISKMVDPKPVEEIEEKMRLFMNRPENAKFMNLMWKIPRYVLEELAPGKWHVRFGEDNEQCVSACRVLERLGEMVQINKDNIKAQEAATKTVEPEEWKTVLGKPGLYRHDSGYESTENIDIVYCQLGKTAVGKLPSMPKPKVITMGYNALEEIARHTGMHKSDVVDLTAVANANRDYTATIVKAVYGGLKNKLHHAGPVDDKTLRALTDAFPEYDIIRTPGSAHPHPFNATARSLVTSILYERLGYRQTIIDIGGNAYTHSVRDRHNVHCCYRNETMEEKDKTVDIVSAMMEQAGKSYERLLAGSDKANDAAIMANLMNKIENKMCLNRCEDCDFIGDKKFTYCMSVDTLYHMTTEQLALSFAKHNIVHGLHAIFFPIDALVVNKGNLPMNEGTWEVVDGEFRMRTHGDSKVYAHPMDKIIQWLTTPIIVCHDFSIVVRIEGFRGGHIIISTNRIDNKFTVEELYLRNVWMTDTPDEQIYQIPIIDVYEPKGLLDNRSIKVKTVKINSRLLDLLCKRIADGPETPQELLTYAKGLTYTIHTTTINIFRPFDVSDESLQDHCCIAMERTTRLLANMKPLFDHATSAVEEKAWHWTALDALINFGKKFALHIDPTQVDVIKEFIRDNRTDNIYSFKKLSADAVKGWQAFENGYLSGANVVTYKSGAVYHSNITSPSVYLNNFEMNLAVENMPPSHTSKGRFGNNKVKAAKCEPLPSCPHNHDHVFEHIATGFKCVCCGVDDILHNMLCSICNQDTKCKPTAACDHEHKNIKEHCCGQFKCSCVLNIRCECCRIFSAKTPCNACCKPTRTRAKWVGSVSEWYAKVRGWNTNDQGRLVTPSISECIPVVDDQHGHECPMCKNWYTHSHKYEGNLRHDIFRGDCPFCEDSKNLKVGEKWENADDEENQQDGWFSSGNLKSGKPGKKEEQPGSEGKTDGKKSTQPNPPKDKNGKGTKEGKVENKSETKDTGKRGTAYTKEREKTKLEAVEGYTPGVKVWNHKPTDTVAVNDDFTHNHRCVKCGGLYQHTHRYSYLNHAQHVDECPHCNDDPKPGKRSRVRPISSMSEGATVKVGPKPISTPCFNANSVSTEYKPNKIILALVSKYITQRDMRAKPEDKVEYKNHKNEIIGTYAVGGAKKTYTYRLAGADKPLRTKLPWSLKDVFVFNRSFQDTYSLIDSNIMTNTAQEPWNDILEKIHNKGRTNKMIVNHPDVNVMFRSKGKIIYDLVDRFRVVTDQFEPINSNNLTSTILRLISYYRKQALANEIISDDRTTVSYPNQHRMHVLDTRDYDEDESVETGTDDESASGSDDSSDLDLDENIQFVHSLNNGEHKVKIDNRVTYDWKITKDVGTPGSHWIKPTNDENNYRLVGTTHDQMDTMKVEKIEKLPGFSLITSSKGIQWLAKTPSYEIDDDVINWCKENKYVSLGPDEEGCREIDTHKQPDWIQKNVVANMSDIMLVETSLDVSQCNLNDIVSVNDVKWLQNEGTGDCGYRALRHFMALDLNTVETLTGTTMWHSSDELGMLANHKGRNLITYKNGEFKVYRANHNPECIFIMDATAQGFKNHWVAAQFGKCYGNIGQVHETNYFFRKREWINQNSMEPDISYLEALSYVMSPEDKATFHATLKHSGALVPQVLKMLVPFGLKNTGNFHEYTTKVFDRSEFDKFVVREVIGGRQISRWNHPTSFGKTTQAPKRLLTHYKGPFDQMVLVVPYVAIARGTWEDYSKDYKHLSIYYRAGEIDQFNLCNASNKNDAVIKIFTRATFANQLASSPLKEKTIVCFDEVHAMDGYLYNALSCMKVNRNPIILMSATQGDLSAYKPESKIPINVKFGNVEPSMVMKYIEDPENANKRIAIICPTVTYGREKFRFNQKLRKQVEEINRNSLSKTKFANRIFMCTSIMAVGVNIPKLDVIFEMGERIEVLPQPFSNVITPENVSNATMVSYGGVTMAAALQTLGRVGRGSSPTAEAFIAIPTASDELPFSFYMEAGIDVPVAFEDMLNVLKTYRFSRAHNPRNVSSDDLERYQTLQTLAIAAKKLNVNYNILRPQTADEIIRSVLTSPTIKKLSSMNAVLTLGANPVGNKSRAGKPNADSWNATCYDCGETFMSLYDLEGSCCHSNLASVNKENLETVWKVSERFNWSHKFNESMVPTLNLEDLSKNGRMTVKDLRTILTTVHVIKLGDDLMTAFNEVATTQPYQRTKKCNIFKVNVKPTEEGLKFVANYDLYDIQTSRGVGLLVGEKIVTPCTFSEGRINPRTRVEGICFLIVSRMKTGHILHEMSACTSPTNTSLKEINKRIDEADVKSGVASSGKTHYFLSSGYTIVTKQVDMVRKDQTGQFVSAGMAMHKPLPNKVCFDEATMWHRAEMIFYNWDKVNKVAFIGDNDQIATQNNVNEFLVLPTQNLGGLLAKDENPLRRARTVGPQFGRAIIQFMNFEYNPDYPTNVKVLPINSPTGKKVMQKLHGQPISQIVTVGNKLRDEIMLELSRSTDVKVKAIPVTTITRYQGGRCEHLVCIFENVAEMSSRTEVAYTMLTRFMKNGTLLVEPEAARHNLIMNEVAEKARTSVDSDNIRSGNLNFNITWTALLKEVNFFRKLQEQYTMMGENRAFGSVVYLLCKLFRVDMLPRFVGKLITEGIITEHKIVNNNLKCATRSVINSSMQSDPDVSQMEEAMEDHDEEKGVLWQTKWNKDITDCLAEHKFPMPKKTCMTTLRYYNEAEIRFMTNIAGNVNSDCPPPSAYYHVEGTGWSPAHQAYISVDLSDDYVSTNGIIYKNIPDWLTETADEVGPPVFDTERIDNIVVMPTMEECCCHDNGTKCLYCVNVDNEHKNAMMIDCFNRRVVLETSGEGLMCGLNAISMQVDIDEDVLKKAILSSKNEETGENNFEIADLLTGCDQIGLGLVVKTRENYYFANDHFTGSDNDAYVYYSGAHYSATMLSSERGGFLYSDSQTPKKFDRKARLKKILKDAWHQHDYFVNVYYYNHVSRRLMRWLKTLWASFKHNVSAVIEIIVDYLRRAYLNVKTAIVGGTPLRLQDVATAQHMDVLMKLNERKNPTITIVSDDVKILEPIAPEHWMRKDLWDWPRNPNDDEMLQYAEYLETFDSNLNLPDWFFVDEIILTMDSTGERFKNISVRSAFFPKITDANTKEMELHMTTIRGLSSPEWIADANVEANMKIISSHRTGLYNLWTEWKTTNERLSKMKKTVFFDSNDNVYKRIQMGLSPFVSAFRSSDKIVLRLVKDLTVSDDVMAFLNENGVFFEGRDLLTISLQPENLGWETYDRFRVLMQTQDIFGEAPFPERENLILYGTTGYEITGDSRDDATWSCGGMIASLKSNILILRGYNGNMENMINTSCSYLITLLESSTSDAKAMIKGAMVHHSTDGYVTQTVGQDQTKPVGPGNQIEEITRKLSLRLQVTNEVKVDSNSIMSYLKSSLIGNYRVITGQGLKTATELNQSGFLNRECGDCGKVRGTYQKTAKFTCSICLGFDAVKEQPGRVNTRIKAADGLPAFYTLGEYVNTGLMLDILWSKKNNYEKPTEVKGYRGSAGTGKTYKLERDHDMVFKAGDFNWQTWIMSLARSETATVVIDELSLVPADFIAWLTHQTTVFGTLDPNQSEAPCLLIDHTKIEVITNKLELLTVCHRFGPLGCKLTSILSSYEVSAFDGNRVDRIVRFNGNLNTYHAIVDADITIILDHETEGGEKIFQGNEARVVSVVVMPSFSWNPEWQKILYTAMTRYKTSLFIWYKTGKGPIMSFMDMIAPVDIGALVTARGHHDVELLNVTLKLKNVSDEDRSLAIISVGQEYIQAPIKEPKEFNREEWNYNFANRRTRESIYENMGFSQTWIAKASGSNIYAQRTSTAGVTFLTWGEEGQPDTITAMLEENLQSNGDIIVELYMNKKPTMLQKMAVKAALSMWPGGSTPEETVSNFRKMIKPLPGKLNAMIESSSDVFSKIAGNIINWFHDMFMYILSSINHGAAKLVFNSEQKYYVEEMDIGHYLDYLTQDSIKTVDGPISTIKTMFGYVINYNNLKTYVSVRGQGKTQIVNVSVDDKADGLKGILLLDDIIRILSTNPQLYQGSYEEYTMKDSVIVDVRMKDIVRYSLVGNTMLKHESDKSVMSVRNEMGQSIEIATIMKMGENRVLIKPNLTNAVSLDSIIANLEHFCDDNKRGGNVGAWKAFKLILNTVWLKIKTWYHKCRVYLTSKPIKQQPEPITCSQGWYNDFVYDSSCSEEGTRFFREFGKSSTTTILSDCAIVETTNSFIVIEYKRGAMHLRFSRKMREFKPFVARPWGAVSGFLSDYLHLAKVLMRNEKAMDHEQWIAAWSAREKDRVMQMIDSYRKYKTEKKRQIFGDQYDEQGFFIGRKVTDSPVDKYDTFPETGRTPSKFVVPEFVLDDDRTQSQRGAGMDMERLIASWLGKPVEEQSLPETWKKVQDQMTSRWNQYVNINDDPGIELEPSQQLYDNFEEDDRNAPWAFKTIFVCIPPGGGKTTLKNMDPENFIDVDDIREHKDWTTVPSANLSHMLAVDASKTKDSLEKMCRGKSDYGKIILCHHPSQVPNNKSADVVISVHTWTTGKMHEEMGKNDLVNLGKKYSMYKHSSIEDLRQMLKDFKVSQLMAEINEGDIHANPEQPMFPSAVAYYESMSYSDIYEIPHPTEGTIKIKMPQYKKKETSRVVMGKWPAEYNRPVFHDKADAIYCATSKRLWGVQKLRKVKQNKHEVFERFKKAYFVGDQERMLKEFETNKVAISDKGTGEWIRTHKKMEQVIAELYKMFKESGTNNLLNMFNNHVKAESLYKEDVINHYSEIVPRLIVWHPKIFASLFCPVMNELKRRLKMLFKTNVVYTDGLTHQGIEEKLARFSPDWKQWEMDFSKQDRQTDQNAMEFEFHLYEKLGMDQETLELWKSCHATWISRSSHTKGKREWMRKTGDASTALGNAINNFRAILRLAEDPRFRGALILGDDSHVFYEGEDFDLKWIQRSIERESNMKATKESNLLGSFCQLIVSYIPNKGWSVCPDLKRLYERFTNTNKAMCFDEEEHRVRAASYVYMIGNNEMTRKICRTLKLATPPNRRHSLEDLIAKTCLKRGLTYGSVSEMTRYLFQELENNMTTAYKATFFVHSR

SEQ ID NO: 1364 - protein, 4956 aa, Morchella importuna endornavirus 2
MMEIWLQHIKDQELTEGNFETIPVADLLEMLKKVFGRMKRKDYRAKKKQFLLTETGKWQHHLEWTSNTKDEYAFNLIELADELEASAEDWEEAHPPPPPPPPPKEKVMREEYTGPTQVGGSSDCWSALPLMWQGEPWHLGGHVPPMRDQTLTIDEVLEALEASKQANITFCWPTDEPRYTIDFAALYTKKKAYKFTRSRKLVHIEPCVEFDGKVSLEFIHKTLKVLKNLEEKENADKPAETPEKFVIGLDPGFFLANSFVEGLRLATGDDGSAQYREAVNNHDDRVVNNTFARIELQLVKTVKPSSNLLSGNYSSMERTSFVTSEQTEQSADKEFLLDVCATYAYNNVDHDVTTYDDATAERLDRQTWFERKTMDIQPTTAQSTYYVAIEPEFNRAMITDFTVIIGPELGPDNSGKFGGALGWYQTVEGLTYYSFNTESKGTQVGWWHEFLRGNNHSTIRGVPFDCVARKSFYGMQVVIITNLKYNLLTVMESNEHFFDIPVVDTTFLSNFGLPKIIVRRMRLNKDLLNRLMTKNLTGKVGKDSLTEYGMALSWYSYNKRGVELANYKITPEDVKTHVYVAMVLQARESFYDAIYEQLLNPGLPKVLFAAFSSTATVAMDMLGDTTKTIDFMTKIEDYIKLPNVRSMIGHSMENWMSIDVWSQSSSIIGVKLNDYSICAHHTMCLEAITDYRCTCCRAQTAPIENSRCICCAYNPNPCYHELNDEHKDPESSNKCKCCNRSSSASLCIDCRGNTAEYITLETTAAASTKLGVTKHHRAKKEVVKTSTKPDGETDKPTDQLKTTHTPHDDWITQQGYTWHDKFKKFVHEVDDTNACIDLNDTGNHQHRCWKCNTVYEHSHAHKSTLHPQFFGDCPTCPKRPPPEKREERKPTTISYTHAQLAQSIPSNALAILTGRIKLNELAHVDDAHPLLSAIPFICVGTPTIPKTMFTISDVQDVTISDCGLDCVKTYIGIDFSEVRAMKTIRKLRGLGASDIQKLLKDYSINSCIVDAAGAHFSRSNASENFAVIVHGTAIDNDNDKSHWQICKLRWKEDAKVEYFCDPLSTPQKHHTEAANVYKCKYSELSNDEKLALAFMMIDKHTVAITSDLETPKVHNGYLYNSETHEMRNGQYNFKLKEKHAEMATAMVECFETGVMPEILTGAWDIDLSSILDVQTHVDMAIRDELHKICSFLAEPTLHGTITSKYLTTDLKGKSKLDLTDTKLKNGDLIMIREGTSFKPKVLSLKSGMVDVKSNDKTGFASIDIVVPKASFMSSIIKLFALTRCNTTESDLINSYKHKSTRITVGAGGTGKSTNVSTEIKKWLEKQDKFTKPLVIACTSGGVDSLRKKLPKSIMVYSRERASYIELPDHDVVIFDECTTILPWELGLIVSAGKPMWLLGDPTQISVIDFSSGGGGKVMLNAIQAGERYQKVKKLTSTYRYGKTLVGMLSQHPAMADLESVAPHDTTVNLKWLEKWNTDDILDLIGDAQVILCFYNAHVKTLTKAMQKARKSIRTITTVHTYQGLDADKVAVVQAPLSATADTHLSFGHCVSAATRCRTSLVWITINDYSPSTSLAGRLGTFIGAGRMSTGEVYTNTSKVPLLMRKIEANNRLRDIPDGEPYVIDSVRPFMAFVPRGWRACALISPTEQQLGSYILSTDVRQIQLWFEYEWGCCTWSATPISSDPMHLQFSTAWNSNQLIATQKNRLDLPLLTVGDADELVRLSQNENWSLNVNGIANNFFVERLCLAGLLQPHMVVIRAGKLCSGSAQSYEYAPIYEERSVEIDTNDEILTPSLEKRQPELYNSVTSASMSSKNFVFGVGKYFEILSSGGKNEASKPPSNNDLAEAINIVTQTTEAGTTTVDHETAEIVNKINMELPDPDTNLTDFNPGLFMRTLQCFPGTSVVTVTTEQNENGAVEGINLKVIGLNARINFNLETNELEFTNVPTKYVKSLTTLIRHCSTGVDVENCGPAMTNLLEIGWWRIRIIAYVAKVYHANKMALVLTGRLEGWTVETIGTCCAACAGVKFTNGNHIVVVTKDYMTAAARTVVGEQCMTIADALNQVPTWDYLDPELDNKAYSHAILTERISTALKDIPHGLTGFQNWMWYNKSDNVLLRTEIKQTLNKDIEITNYDDMSLYPFFGTNATALNVWNAMNTKLGATSLLATVPVSCHTGGKRQVIQVLPPINLQGYINVALNHLYDMFRDDATARLIAKKYMGKIGAKEIERLPGMAESIAWHKARNTATYRNIVSRLSKQEIKALKDERKIAFVPTECKIVLDKYEMGASIACNNRNTVCDGASSAFDVYTCGLVSHKNKQIQLMGSTIYAAYTIQDKQVKSWYHPTDDWSMLQFRLDTPLYRDMIKLHNSRLGFEDPEYQLNDAELRGGKVWTGMHDDFTTVTVVSNPYMLSYSGSELEEKYNSCARIIMWAPREVHEQSGIRFVRVPNSQKIFTVHKDQAQAIDSGKMVKGTSLKWHVLSSHGPIVIYELTNDPVWFEPAYYSQRTIIIDTPTFLIDPTEILKQRSFVKTKAIAYNLDMVSNLRRRLLRPGTDWDDLLVQARTLVNVAQFGTHTVSARYRTNVAEAKMACRLAWMTHQMEETQFSLLGMDGDNLVRPKEMAALALGKLTEKLFPDVDETDLAKAINEFLQIDKAKCLIYNFFNCLNKLKLKIDEGKRRVLSGDDVPWQPTDRNFWSNKPSAFEKVAFNETDDDITIYVHCPHCANPSHRAAAEVLSEGKINFSTHQKAIGQYLITSECTHNQRDGIKIQWHGYSSGKLDGKTVLWSSEHRRINTTVKIAVEDNHLIIEDEVLNLPADLNVIGINSYPIISNCIVNVESITAEVELLLGNCYSCSITYPCKLDAGFDFGKRANNVQFYKEGDRTVRIIDEAIADASDDEEMVAITKKIDTTESLFPEVDVANFLELSKNFTYEETSGAGMRCGANAYAQCFNLDPDDVNVMLETITHEEGNFEVTALLQLAEIEERALAIYVRGEGVAFTTRCEISESMKVIIHNVNHYSSVNLCGSHDIPTALIFTNGEKIDRNAMKVPCHHDEQTVTHDNLRLIDTLLEDAKLESITKRKRTRVEQPRESYEPDTKIKTEKQPFKRTVQERTRETRQQKPVGDPEYEFFNKMMKIDDGARPTLSNALIQALKDNKNDRVPIYTNPGVGLVNKRFSLGRNMLHTDSTHFVDRVYRNGARVTNWMALWLSEFEARIATLNPKPDDIWYVYSLRDGFATRSPSVGKGRHINIGQHSEKMRSLGYETLELDEEPGRFGACLRVIFAMLLPCYKKVYFRSGRPGLHVLWAEHMQTRIECTENHVIIPTNTFGPFIDGICITKPLSVTSIAKFLASNMNYHAIYGIDECDYSWFEIKVCYFAPESKYAYSNYNLNPRYAEIVKEITMIPVDTANKENNLKDIPFEMIQLSFTSIATTWPVALYLDPELPLVSREGAKPKDSKLVTEWLACRNNIDGTPSGEEWKTGSLLPRMVINNNYTPKSPLIQHVKMGKTNVLFSSDTNKYCVRNALYYCLHRRAAIKSHEFTYNINLIQNICKFKPFQTQAETISMWTMLGLNVCLTGGQPELAVTVNDGPVDYLSIRVDIMGNQHMTVVEEGDVDVGGEYSATEVRLEGELITTGEMNHQISEFWILSEYLMTSVDLHKYEYITRNQDLNERLVNARQRMRGRYDVTVANTGGAHWKDHVVKATIGEQSDRQFFINNSLVPGRTYMFRAAHGMVARVAGKLGNNVLIPSGDFIPNVYIDIAASVDKKKPTKLPKRTLRSGAKMGFFKASEKHWAIANYPTWANYPVMDEPDVLLLVDFDNMDHHGRPYRTRMLDIPPGNIRIPNEIDIEEITLLRLGGPLRLGVKAGEWYVSTVVESRWTEEDLVKVVKKLDRQYSPTKIVKMWSAVKWEHATWRDEQGKETVGNRLQPLKQKLTINLLHIRNEPLTDESLRIINNNAFEGIDVTGDELTRAIITWFPNLDCEPIVKEGKYRVRILPFNGVLGETVLSGKELHDPHSFTTVTFELIGFGRDKPDKFITVKASSSSPVESLDEMKERNHLGIKEYCLQPTLAQHLVIVGEFGLNPNETKKSEIVKSLCKYSGVDEEAFYGLTSRWAINPPQGWRKAAIVADSRDTQHILTNHPHIGLAFEYGWGTWTINKGFSFEGKPITKNRTSYTTISSRKIEDYHLGFIDVTKFIKGTADSVLSIVNALNGTRHFEQFKAHCQVSMRPTYTCWHIWKIVHSVCKIENDTMCFSATEGGFDHSHEIGDNSQWEQSLNDLESRAETTCVLRSRQVRSMVYFVDPEYDEEWINDDLPVRITIKPRVSDLVRENFDWVSRSYGSITTLDGWTLEFSPVGFGRDNNSTDVDNQIRIDDIKTKGVAKYQYWAKEIEVTMKNEMPDIVLNMTKEQESAIRTTNVINELTYVDWDKEIVETKYNAGNVFVVGNGTMTSPTNDDVVEEMVPPSVINYWDDETAMIDGVINLPKRNIKMKVNPEFTGLKEVSKATMTKYPTHALPGYNVRMNAGAQAVAELFGTHLSLRTVEHDPETDARQFMSIYTHHGAVAALEQVNIEPDEIIEWLKERPDNLKITKEVDQILADGLDITGLDKVNVHMKLESRLKDVLCADHKDANGMPLTIEEQRIRLIVWQKKGITALFAPVFKKVKENLKRCMKQNVVYTDGMTPMQISALLNNIQATGVTFAEDDCKKQDRQTDKTLIRTEMQIYKKLGANPSVITMWATVHDHWRAKGIGIKFVGDASRHTGQATTAIGNAIVNLLVHMRFVKKMDTNMKMMLILGDDNIMVTTGAITEKDISLNSARHFNMVSEPFVHERYGTFLRNMVYKNSNNQIELGPDFVRLRRKFEVLNGVSEANDENIMMRSMSYAIMMGAIPRLLSVVESKGWPIKLEMWYEYHSVIKATAEKYGTTEAHIESHVNKLINMIRDQTLITRTKLMFTEKGH

SEQ ID NO: 1365 - protein, 4734 aa, Morchella importuna endornavirus 3
MSNTNNNTQVPNTMTNASIYPNKFGSSLENYPCVSDTTHTTNNDNINIAEHMLAVVSGKLSSEKSTQANLWLADVTSGKKTLMRNMLMNQAPELQGVQLTVCDDNTSKTLYEIVVGLYRELSFKLTPHNLASGSCNSLTLRQPRVKKITVLRSEDVAEADTSEPVIGWPGDCWRVLLPQKTEAPSLITPSQLWELLADTVAWFRKGKTFNMWIKYEKHGKNYHILSCQDAPFRIPIFDIPEGYEPLTVIETWCKPQAQAESIPVEVSAYELDSGIELDYDISDLWEAEYLTRCSETLKGNDPDMEEGLVGARDYIENVLQGLGINPASVKRNANIEALINSTNERLLEPALRPTGKRQLEVSTSLDSTVCEQLRTDWPETELVMVRKATNPHTYLAASRTAITRWLVSIMPKHTALFDIGGDFALHVDDGDLHVHSCYKHASPQDQARYINLTGRAKTLLLKKLAKNSAADQEQADRASIPNVLNNLSPENLSWCDKAAEDCLLQPVDQYSYGMSVDTLYYIKPIDLLKIYAHKRIVKCTHAITLPKDYKYKNEGALPFNEGTWHKVNGKLIMTMTGLSQSYINDLETIDFYLNNPVIVADNFMVYCKVEGRRGPYMIVEHYVMARHFLHSDSMLHTVWQTTDDNVVMLFPVIDIHKPVSLLMREPFVMQPTVFNRFFLEKLLNRLMMPYTWDQLTAYASGLIGRHYVSASGVTQTWDQTTFTNDIVIKHCTWAYWYKSDLTESIMPLIKKADNTTHKTLWWEQAWKAMKTFLMELGRQFDPTDNELVNEFISTYSEDTSHIRALWMQLGMAKSAYNTVLELGANVSLVDVIAVQYNIKTDQVPDVAGSLLVKDRSVKRNVMSLLTESANNTITLQCNKLSHCPHDHNEAHTHIYISHTNTIHNCNCCGINSTLFNGWCTLCLQHYPCTGKNQTCLHEHKLKNDECCGLSHCKCKKDVRCICCGHLSLSTLCRVCIDENEDEKNSSETSESSDDDIETSSSSNDSVFAGKEKMPKKGTENKKKSKKNESKEKKKEGGPAKEGDTDAKDNTMTGVKSPEVKPDVTEVEAPGQDKGTDVEKEMDQPADDTDIEEYDYMPVNGKFNFKGVVTKAYCEQNVAIPTYAYNHLHKCLWCHKVYQHEHFYTQTKHYQAVYDCPNCYAETNIPATLIEDSFAPDDAEFISRTSVATPLFANTLLGKEEKYTIWPTAHSLKASAPSVWRECLEYQAYITFQEHGSLTIPDPALGMIEMLGEKRERQARLNWADDLSESSGDSKGNKGEVRVEAPQAKQPEETNTQELDAPRDIDNEESTKVDKGKGVDTSPSDKTFSSLHIQHMPLIDRNKPSYEPMQVPQQEFFHTLDFSAIVINYGEADGDGFCGAHSLAQLWKMDSGLICQNLKYMTDRPDWWTADELGAYAIVMGKNLAVTSGFCSRLYCGNSKSWEYDCITSLSEITGDSHWVPANLRYAYLANWKLQSLVEFNSKIAAVASAIERGEDPEEVARYDDRKLLTAQWTLGGANCAFHFNQSQVYETWKTFPGKFIDGRIVHTSKSFKGKKLTDYTLKRPSGLRLCYAPTGMGKTTRIWEVVQSKKILLITPSVATVKGAVSHMTNIMKKTKGSKAMTVVGRAQEKWWPAGKTAQDAANANVLVMTVNAAYARYCQDKVQASVLNLIKDRFVVLDELHMMTPNYYALCRVLGNHVKLVMTATPHGVTASSDTAYPVTTIISDQPLATYLDDSPPVDGTFIVCKSEREADDDTLSLRNEVRDENKPLYQTIVSKTLPHINLDTVHGGGVTECVTTGATLPLARVWVDKGVRWDMYYTCQPANEGMPYIFSKDRDDNTVTQINKNTTLAYTAKRCIRMQLQDADQINVGVSEIIQSRGRVGRTAEGTAYMPYVSSGRIGNPGEIIDYCLKGGLPIPECLREQFEKLKNFKKINIDNVKRACEIAIKLGYPDETHQMVSDAQSWNDWRVELEPLLKNAVFTADEYGMDFVMSKVYECLEQPSLLIAADKQMVKKASQINQGPSTGEASGLSRLAVSKSHIKSTVVSFVQPTFVCYCGKAADLVVACSQCVFMLPRTTTNIAPTLKQWNFTEPLRAKESMIVAMGQSASKQHNKDISQALMNTFASSYNAIYYRVRRNITDGVSKFADSVYTSEFTNTKAPEFPSLKKLNDGEIGIVYVPRTKHAHIVLYKSGSWVGMPNVLSGQLSVHMHNNNHILGMACMVDNMEPIDPSRCRSVIANSQIWIGGAGTGKTTQMLKETASESLPVVSKQSLMLNTVLKQRGETPISYLIRANKPKSVCIDEIGMFDTIELIVMAQFVDKMYLAGDLNQKTPHGEYLSTKADIAMADLLKEIPESSKHDLLTVYRYGEPTGKVIKRFMNPKTTFKGLDDGGIEFHQMFDTTAKAIQDKIVNHKMELAVTHTNSYANAIIEQAAHTALEVTTTGRAQGYEADNVAYFACCTALKAYDASELYVAMTRHKKKLNVFYDNRGYMALSRLLEKSFIPSRNGNNNRDDYTLVEKLLMVLNEIVLVGKQTFQRMFAALTEKAKRFIKRILVVLSRAKPTGSERNAHPGFDLYHWLLFASNKLEAACAKACEWVDEYYKSASESIKAKYKKLIAGDSLVVAADGQSVDSEAENIVDVGLVGSMARMHHVASCIDPIASSAESVRRRTMTVITTRWLKNTDNISRRMYNRLTTNNQMSDDVQGCVNALVAIAYNEGITELDQFDYVHTNIASTSHRATATIYTVHVSEDFHDANWAIETLTSDFEWTIVEHGTKNSFVRRHGANTTGRQLNEPPRSTLIWEHDLVDVSLDNDSPEGNQEMINMPRDRLLILKETLHCMLDWVKHHMPKLWDDEKKQYTFGTPENRRLFARLKLEEGLYCSEDEDSLEELLQDEPWVPYLKHNVKEGMMLFKETMLNVLRGVPHLWKLIRPWLYKQINKMRNHVASVSLNKLKIKNKLQAVISKTGQFLIESFEAMLDGYTTVGYVFADNILGQVWLNSMARDEPVILAGWVMTIVLNPVLRDRCGLTNLSQAMREISNLNTNVPRLTIPVIAEEVQDAWEFALAYLELNGVFVDSTTYDGKSILFALPAPDSFEFCRPAVFNPNNYEVKSGFGTVASREFAVSPIGNQYQIRGINMHIRRMGCINDPIDMFTKIMETWEGNKTAFVEQTRAVCPGYDNDYQPDTSPFRKLFCELGTVVIETVHTLGKVMINISSATLLKLSHAVASGLQYLARRIEEWNNLPDDALENSIETLFGAAKIKIAAFSDRIPKEFTHSTNTTGTRAGANDDDDCTEFITKRVESMGNAAMVKVNEILDNFTCCTSEANYNDWLKRTFPDTYDQEIEFALKQRGSFNYTMKRVIAVVKERLTKAGIEVCDNLLKPTQLLCTYLQQNYPNMYKNIEFSQICVVTKSAFNKLYEQLVDLELVPTTLLQKIGIYAIGMASITVDVCETALTVMKITKRKVEQKAVDCFESIQTYLEERVTQANVDDSRAFINEWYNKLDAESKKIATYEDYVREFIDSKFSKPFKAIQEQFAEAAKRDLDEEIEKLNETSRKLLPPMIHDNASEYYSAISDAGNVEGVGLIDKTNPLMSPVSGYDDVINKMLDDHGLEPAGHINANPATDKLHENSHLVAYVTKVMEEMIEWEDIDQVKPTRKSREMIQHLLNRVFPTSGSTINNSITHDSIRQSKSGWFASIDNSKPNVTSFKFPLVPEARMMFLTKTHAVLTIDKVAVYIVSKGKQCTMYWSDTNLMRNDKLISKAHGMLAKFAGSNDVIVKTMQYVLREAEKFLRVMRDEVVWRVKAATGLIHFEEHEVDMSVRTLYLAMLSDLKMIGWSKLNKGKITRYRNHIFFDRRSKNRILDCHTHIHVEKISREKSRVKIYSGKAETFNLMLMASPWLQMVTATRDMPLDEHSLDFTNIAGHLRTHSTPVSENIEQFRQQFQFENQRAGDRIMDNFAKFGIHKDVNSILDLINSQTVADVYAALHSSPLFAQLNVTMENNFMQTKTDALKEEILSEMMANEGYSHVEKAGKVLIILMASGTGKTTLKNNWQSLGLNEICEVYDVDDGLTGLEDIAQLPWHSKAFLPSYRSYVGKVIENAKLDRKSVVLLCHYPEQVPDFDKYASLVVHRTDVDNLAIRPWSMENHAMLNMVDGPRCTHVTVDSFSKQNICIINGIKSSMSHFSVNVSTDIDMAPLQVQYGTEFYETGDRGPETVWMLPSEGKIMSSETMFVPAHKQVTLVGGPTEINRPTISGVASACFNALATRLHGIMPLRKVQIEPLEYVENIKSLFIKGCDEHMKRFQADPITPSAEMVMDWLVNKGHRLELLSDMVANSVNYDKATDYTRLSAHYKVENLMKEKVDELDDQIGRLIVWNNQNINMFICGVINEAKKRFKALLNKELITYADGLDMVMINNKLKKVKKSTYMLEMDLSKQDRQTDKPITEAEHDLLLQLGVSPEVVAYMRQICDGFQLQTSDKFKSRRPAMRLTGGAMTALGNVIRNLLIMADINEKYDVNHIFVLGDDSLILTDDEVSEDWLQMTCKQRHNVIATINVSEKTGVFLQLLIGYIPDLGYVASHNFSRLRERMSVMSYEYGSEESIAKFASYLMMIGKCAATDRAMSHLGATIYPPLGSTMSDRVTVNAMKMGADQGAVESLIEEIVNVIINPMLRHIDYYYMAKGTVRDMKIGVKTYNMTNTQYAAAAMMKPMVTKRKVNKLTLLQTVERMMLELE

SEQ ID NO: 1366 - protein, 4594 aa, Neofusicoccum parvum endornavirus 1
RFRERIGLNKDDNNLEGGSGNGPARRLQILRGSRTPIIKRERKSIRLRELTRKYVNKSSGLLEANAIDKSLIQTSLGFMQSMGMYPDSSLLVGLNDDCLFQMLLMQFIKNNFKNTEFSEFESVKLRASLLALNKAKGLAVGFKNQLAETNWFVDFPSTFINLCLADGQISSAQFKGDGYTVHDLAKFEDDSDEFTLKMEPHKTLVTLDWATMPSKTHIKCSAVRCHSCGHAVNIPRYTRVHASEYDDDFLNDRSSEIIALFNNEYVDVQNMFCPYCLQSLDQEVPIMDNEWIFKTIVDDAIDRIHAGSQLDDLGLMGYLSGIDLAKASEYRNIATNHDLRIVRNQLSRLDIRVLSLPGSMSEQHKKLLARFYPRYEIMSGSMASSTSPLLLANAICAMSTIPEMADGRGLPTIITQSINEMRNVVNIESVLLSTTPAANSRLVCYDGTTCDIVYSTLHSLISHLPQQIVVIFPAAEYLTKREGHLSHDSGTWVTNTNSVLVMQSTTSDVVCHDKQLLTNILTKQFLKVNNTVYRIELMDEGPTLTKAVLIHVAHLAVADIGKRIVVETKREFNVPTLTYNTVLGTMNIPNIVTKRVTVNSKVLQTIMTRGLTGNMGIQGSLDYALAIAHARYSIDDTTYNIYNLDAQGAIEHASIAYALNKRAAAKRGLNVMMQELSPSLRYLGQAIASTVQSGLEVIKAMTPNVTSTVSQILDGLDMNSMNVLTRYASNPVWDELDDWVTKATLADVSSFEIKATVTVHAYCNHQHDECQHLGNGQCKCCSSPTDDDMCDCCDSTCTHDCTHQCIGHDTGIGEWSTCPCCGKQMRTNQEVCISCEDSLEDWDSGVDYDRFWTFIGRETDKGRNVDALQVKPKYNNEFMFRMANGTTKPARPAIEPCTVVDAKQGLHTHLCYCGTRYQHSHPFKSLLHPLFNGDCPKCDGNTNNLVVYDSKDVQKTLESETLEREATATGEAIQTRAVDEVQKPEITPFADTTNTSKLLVATDTVFVDALVGFSGSDSTWPTTDHLRPGDHPTMSRVTWVALGDYFMSQTILSMLAELPSTELGPICGYTSWHAVDPNGPTYDVICNITGKTEWFDRDDLHRCALSTNSNLITVTDVDTRVTKGQPDDYFTVLFHSSAMRGLTVNHWHPVKCIQINYTSVGFTYHSAVSVKHIMNVTKRLTGGTTSTYDSGELDKTMRVKLHLELAKSDTLSSTWANSGLWEFVFADKLDPPRFIRNRVDQAIFESSIDLQQYNNWSVTVPNWAYTAIRVLCDNTPISLRNPWLNAPLNYDFDADASHDLALEERLRSLVYNYKIGSCFQHMLAGDQQINWIDLPIVNLGTKGVVLDTLDTKIKTGDIIVLPSKGTENKDRLVQLTVRDRYISVAGTKTPSSKLMTVGIPRQSAGSSLRAILSLLTTQVSSARVDTLLDNAVGVMAPGGWGKSTHMANVADSDSTMVAYTSSAVESIKQKLHALGKSVVVMSVERAAITKVATKNLFVDEATMVDKITLRMLLTNDVEQLHLYGDESQIGVIDTLALPGMRFNNSIITAAPNIIRETGTRRIGNPLASELHKVDKAYLALSDHSTDFDVVNMQEMDLDKISRIVNTSGVDAVLCFHNSTLSAIRRRLSGVGNVKVAKPPIVTTVHRFQSKEANNVLVVQSRLGDRSGIEVERDYCISAATRAKVKLIWLSVGMFNTSTPLSDRFGTGSVVGGLMNPFRQLIPRMLTKGNVSDRQVGIIKDVQFNNAKKSYEKQYGVKVKLIHATDKDIIVITLLGFLVGKLIVTGSQDDPHISVESDPTGKITADRVKQMVDMIKLSSALPINVIQLEPPMQLPSKHRGDITREGADKLNWLCANVALKQASSTQHVEKICGMVADMRISGSFKSLVKLDVMSGKHACSLQFSMYSTKKCSLSAKDTVNSKRMALAIADWVGLMAPSWNDDMWSKVSTFSATTDFTCPRNYSLVHLITSYVDPMWSNASDLMSAVMPAAKLASGDELNSCMNKMASLGAEIFVGDEPVDYVFPTSFVAKMKSSKWLVMVVDGTPNVFLVEGNRDDLLATSDEFALANIDQLPNVLAKYHGSSLPLKVLSKLFGGNQANQLAGIDIEGLMMTMEDHKRLNTQVMSYLQDKAAKLRVQTFKKRPRPLYVRIGTKSKYRAMLGHIANDLPINITNVIEYKHEPLELAEMLAVHYVCGAIGQPQGDSLLIYTALPHVPLMQSYFSATSKIVDTKDINIPHSSLSINVANHVINTLLRKPNTATEDMIDSVKSLSGIKQRLAAHNDGSNPLWLQDRPEQPFATILFNATTASKSVEYITREMYLLQAERYYMVTCVGDEIRDGSDVYRFLSKDLGMCVSDACRKLESQGGWTHDHHVVHGRVVAAMGICRVWELQLLDVTTEPSWMHAVVTPLDPVSKVTIRVPHLTIDALQLTRSPLITTRVVRVTRQVFKSMSLRMLRNGTSFGDLLVYGRMLLHTKYFSHDGISSQHNETPSEVLDAALAVWSIYGPMVTGMRHAQNLLQTSDDKESTIMQLINPTLEHLKDNSIGVLSQIASIFGLDMSLSDWINTVADAISGGGKTALHEIADQAAMWQSKVLEDRRQIVEYHAHTSKRMVLSQGITESEMSSKPVLKTIARITGAIVNSGVSIVKGRQNMVEPWLKNRASQHLMPQPRQIGDATEGFDHVHQVGVDVRDFNILIITTGSKGDVAPIIQLADWLSTVASSVAVLCPSHLIPTTKSFSRIKFFPADFDTDKHLETMAKLKSSPIDNIDKLLHGFTEQLNFDTIDPAMFKVDQRFDLVLGTAITPQASTIAEYFDARYVQVNMMPWFVRNVFGNDSWLTEKMMNLQEPMLDIMHIEGVNRLRSSIGLQPLSVSDIAKFNPHRIYMIDEAMMKLRGMTASWQAGYFGASRTSPLSQLDSRDYVAVTYGSMLDDWLVEHSLQLVSHLLAVGEKVLWLTGGLTGKLQKDDKFTKLCKNECVEVMQFGDHHETMRRCHTVFHHGGAGTTQEAHRQGCFSVITPVAYDQGFWVALTTSKGLGCAIERSPRIESVITALRMSRTNQPVIMATITGSNDKSKHRFREALIRSYHEKGQRLLFPKLLVTGDASDVDHLVLVDEPVPEAAVRYANQIAVPFLRTVLSDGAMLLDEWLALHRPCCDINNRTSELYGEYVLAICHDVFVHISYQQGSWRLGYTTVEHTIHQPVLPFDTSRGTASFATYPMHAHGQIVIPGQQLGRHVEIHTPAGVKQAIESNRWRELVKMTTRKTITGGKTPPLHGTCRLCKNDDCVDLRAYCAQCAAVTDFMQDESLMMQQHLETIKSLDQAVSAPITSHTATTSRDDTLWFLSRLPLEPSSSIHSNGVYVVNVPNPIVTYSPSDDGYCVHRAVSHIASKHSRWGDAAIVFDSLIKVGVPAFLPVDDIMPLVLSMGFNCLLIRGNTGTMTQRSKVDPYMVLKIEGTSRVVHCVACNVNINTDVKIVRSVSVTTTDVHPAQLDSHCEVTGLGSIVMPGKLDDCEDHRHVNLHDVSKAMSILKNDVGKPHACANQKQVVNKHGSIFNNNTVMHEFSRMYVDLNIRASSGHYVSVMSRGSGWAGTALSARGNGVYWLNSQPFNSGDIVVMVGDTDGFGLVTQHAGIQYIITDTTNSVYYACYRSSVRWLASIHQRRDVKTRNVEQSALNNPTLTWMRMVDQKYDGLKVMKMPTQVLYVTHYDGRHHHNDKEFIKIKDTMTTGGKIVNGATMADVTNLFKRVMLDNPPLNLWFNAGDTRLICHVLNASQVDWRFIGNFFSNDTVVEHDQAVSWGFVNDDDFDKELSTASSAIQLITEERGSIRAIKDWRLGTTDDIRTVKDIITKFHEHMSDGDIEYLHRLGDTMEVSCHFIESNLGLASESFVWRNATGRFGANHLIASIRMIVVGVPSVRVTRKFTSLQVTSVRDSEALFDDSDEGEVQAPQTSDLHSSKTSQTQEDQVSGSSKNVVGGYTTKDLVAVNKIQSDTSILSGTERPMWFDDSKVDRSMFTGSESWWGIKLRKGQLVKPTTQQDDSELDVKDHAVNALELNTMTCGTISNGIRQALSPNSKAFMPFIPAMLDDLELVPEYREPVTPAVMNVLDNPDYTHWNTKIAPKTGKIKTNEMLTEFVTTNKTAMTQYPEENRPVLTKGPNQTFNAVSTRLHSVVTMRKFSLDPEEEIQGMSECFFRQDWRQQCNHWMDEDPIDFDTDEVKKWLKGRPGALQVNAELESVLREGLTVRRLNDVKVHAKLEALLKGASAEEPLTQQKIRIIVWQAKGICAIFAPVFIEAKKRLKSLLNGKTIYADGYTPDELAARLRIVTDCNWLLEDDLSKQDRQTDMDILRVEFLLYRYLGVGAKVLSLWQQVHRHWKYKGTNVSGILDGMRLTGQATTALGNFIVNMMVHWRVILPNLNKVCLVMMLGDDNIILSSAQIDSELLKKIGRDYYNMQCTSQHNKNVGVFLQLSVYRSSDGHMACGPDPRRLRLRFEFTNGVSQTNDDNMIARSMSYLMMLGKTKETDQVIAELKWPIKPLQWHNLQESVQASARRHGLDTTIIENDYTLLLNMIKSRKTYTISWQHPAETRTMGRKLR

SEQ ID NO: 1367 - protein, 3349 aa, Ophiostoma bicolor endornavirus 1
AGLYKNPAIKNKQRAELNDAHEAEAPAHKLWPIRHRTQGRLLSARANVATGVSGTVRASGGCWECIFGYQLGSDVCIDLDTIKMALIGQEEEASHIRVLVAINEGVLHFSNPPGLPTGTPSPELFAAQRAFIESYEGPAVRLLDVLDSHKGNMLVGFEAMTLVERVARDAGVSTTNLLSPQVKNAMDEMVNKRAIRALTSHPNWAFTLPSSTPNDIMDDLNNEFGAGAFLRGNLPTHSHVYHHASRVAVTEQIANMFPRNALLYDIGGNINRHLAHKRFNVHCVYATTKYEDRARHVKWVKQAAQWASAQLQQPTKPDITSQSVARAILDAGNCMWCKDGVKNCQHKPKTVAFGMSIDTLCHIDPAELITFYIEHRVVQATHAFTIPDNFSFAVDGTLRHNEGRWQRNLDATWTLEFVGESVCYTQGLAVTDAYMHRPLFMAGDTVLYNKVCGRKGPHMIFEHYLFPRSDVERVYAQHVSWFNMNMDEIFVIIPQLDFESAPTLVLKEAYTLKRVTINIRFYERLLNRLMQEYSWAATLAYASSMIGKVYATTNGLHLKWNMTNEEVRDHCLLAYWSTNRVNESLRPIIAQAEKSERSPDFLTGLWDAIKTWGRDFGGQFDPTGSELIQTFIRENSGSDALRVSRLFGATSRSIESLNVATQMVKSRRIVDWVATDVGVISTVPPRTIDHWRESLPNVAADVTVYDLADVDASTITKLQSCNASPLCKHNHSGFHIHYTGNNSALAGKCSCCDVFSTLAPDGACYVCSPRPPAQGMQMRCTHKHLWMSDACCGKGDCSCKHTHSCKCCGLNSLSDYCRVCKFNPSEPPKGSSKLSNLVSNNTVSAPPTAPPAMVAKAPIPKMGSAPISQSATGPTAPGQNLPTLPPPPSMNIVASQNPTPVASVAAPAMATPDADNVSVEPPPVRGNTAKPNAPISFLDVIQELNTQPPKLRPVSSSQQNVVNNLVVAKKEEDVPVSSEPLAPDDAIPEITIVDATADGTTPGQLAGRPIIASSEETSSLRTVDLSQVPNQRQQMVTAVLRGVKNVPGDGMCGIHALNAWLGRNVDDLERWADIAFGHSDWLDGDELAYVAAGFQQNLVVMSGEETTIYRCNSNPEAIAIVHGEFIGMGLHWLAANIEVSMVDSTINNRLYDNFAKLSAAVHATMTSVMDTAEAYHLRSLDVDFALSLGGRAFVSNRMLRLEFDAFDAEPTLQQSPNGLQMIVGPTGSGKTTRAFELLGKKKLLVITPSRSTVRSLSYHMKGVFGRADSRWWPKENPSHNELQGADIIFLTVGAIYKALEGNNQQYKQFIATRLVVCDEIHQFDHEYGLVLKHLDPQRTWFATATMPGIAQDMRLRHRNAIEFCAQDILLELADQAQEGNIEKGCGVIVPSKRMTYNQAQVPGITSDTIGTYDLRLVDRFIATNCVSTGVTIPQLVDLTDLGQRYVIHINFYPEPEKSKTLFTPQLTTYSRAEFVQTRGRTSRVSDGVYTCAIPDVNTTLSNYELLRCAALLGTPCSDVYQQAWESTNDRMFIAVREARDKCESESERDQYNEWLAVYSQLMQLRKQGAKPRFVTSSVYREDLLLCIPDLVGQSQSSRPKKVGASPFNLILDMESIVPRAVYGEFAGADHKKLEVKIESSESFINLNMDTMSEAAKKLRLVTLASVYKTVRTIAAAMRTVNNSQLCNNSPSDCPTFSSHDAMIKLTGRSPRPDDLVGVVDFRTGDGSVMHYKDAPVGDSSLKWSLPTYRSGQLFADLRLLNNLSLNINIRDYLRQCIVLSGPPGSGKTKRMLEEYQVEAVATTSETQLRLHDDWLPPHALADHYGVLGVDEAGLLSLATLFVLISKADKLIFTCDLNQITHEVDQATYDVTGTDSAAKLIMETSEVVLLTDSWRLGVNACRLAAEVGTPINSATGHVDETHAVVCQVGNNASFSEVLTDASPDLVICASNALARDLRSFVQLPITTLNRCQGADVDRVLLVVARVDVMKIPLEALYVGLTRHKTALTIVCDTNSASLMNILKVTPTSLMSYAKAVGGQGHIDFSLYQDMVERLSHRVGLAHIERLVSCLYEVVHNHEQYIHPTYSSAYTGNDFSINITGYYHGRAQACVIRTSYLLRGKRYVCMLNADDTVQQVRHKVLSRVPTRLIVATLINVGARRFTSLGADFCTVMKVWLTKVAQADGATLFRCFRGFVATAVQTAQGFVETVVKLCYQSVESISEFTNQLVSMGKLTAMSGAEAGNAVKAAMLHIWHFERKHSKAYGGGESILDMLLRILRSAVGRAVSTITDLFNWFVSLLRKKETADAEFVPIVMTDNVLQGPPAEDQVNEPLQVVPPEPIQEDVTERISLKSPQLKPTTTCHPDSLVHVEFIETKLNVMTYKPNLLGRAFFKKDETGLHGGVNMGPLHVNFHMHECCDGLQKVMYANASGAGIVYLQRAPGGYNLLCDADSVKSVDTSKIQLALSTMSRFGGDPSGFVDLLMDMLNAVCKFANKLYDLAKWNARAVIGTCQTTSFATDNDVISTYRLFASGYNRTAWSRRNPVSYNVSTMLTTATIHYSDASQECFVVINGIGCDTLVTVYSIGEPPTAVLHTASVSASSYDEGTVGGKRYNVDAFMRLGINLKALQSTLTIDEANFIKETIDRNPLVAVFDYSAETTHTKAKGLVDMTMELGRMAEIEATEKIAHKVAFVIASGHGKTTTVGRLRREYPTYTVLDADEVQQQESILFKPFSEKMESYRLKIQEEVRRRHYDAVFIHAPECAPKGYKVYNIVNTQAEVPRDRIWSRDNVIHNENKVSRESILFADGYDAVFRTCLRVLSRRVVNLLTHDRNGLLIDNISDIDGENFFLHAPHVDSIVRLPGGKRDKLLFDDTRHGMGEQRIYQTGPHVGLARPTIQAEANALPNAITSRLMGRLPLRTDNVSVLGYHALMKKNWHSNADAMLEAFGSDQISLSLQSVLDWLVNKGDKFRLYNDMLKDVAKNEYAVDPNQASVHYKVENLLKEQVNDVLDQVGRVIVWNNQNINMFACPIVNEAKARLKLLLKDNVVYTDGMSTSDINAKLRTYKASHILEMDLSKQDRQTDKQILEYEWWLLRQLGVSDKAVDFISGAMPKFRIRGTNNETATLPAIHFSGGAMTSMGNEIRNLLLVADCIKEYVAIFTLGDDSLILLNYEPDLSYIERVCRSRHNVVNTAVSSTTHGLFLQMIVTRDDDGYFYASHSFARLREKLAYSPYPNDSLEWKMKYASYLMMIGYTRRNKEAMKYSGFVAFPELGTTMTERLHANALANNCSVEAVEVIISDIIDLRYVQSKKHLITATTILRPNRLKFGNKRVGDYVYDTRFESRLLSALRGLE

SEQ ID NO: 1368 - protein, 4559 aa, Phomopsis vexans endornavirus 1
MDSLALHTNSNQRYEHLKGGVLNEHSTHINKRPITNKYRQTISLGQAKKYSPWLNDDLSGLLGQPFALDKELLTRYKFSMDTLGDTSFEKFIDGVANGTLKMPSHANMGNPDIVDSIKEIANLMPNRASPFMKALLTSFHYKVMNKPTPENIIKVINRKLTTSSLQTLFIEELTGSSLFRRYLEATCYNTYTGVKYEAWLRPWAKMLLREGKVVAESGHYSIDGINGADARFIQCQCCGRSCRSVYRDIIPTDEEEEYGFDELQNTFIVDVTDLLCPYCGMDLCITSIDSANPQAEPWLQTITERKHAGNQLNELGLLGYLSGIAVNADNMARSVINNHDNRIVKLFLDRQRLDVVLVPAGLSAGTLGRLNSRFPQYIYSERPAWATVCSELRAAVISNIMNLSRKETQGQTLLIGRNFNQEAESWPNKIINSFSGLSAKHKSIIIDLTTVGLNEEQFAISIESARNALHVITVDSTNGVNFVNNGTGFEGTLEWLVSGNQFILNMADSSTPIQVYSPLQEAITTYNYITLNSRMYAIFRTRPYPGIVSITIVRASASEEVYKEVQLTSPNKVKDFTYPMISNSAFTHISGLPVMTVERSPINAELLKTLLTRNMTGMAALNDTMTYGVGFAHARYSLEDRTISHFNITPTQVATTSYLAAVLASRAVAKRRAIADIVKADPSSNQLSSLAVSTITTAIDWVVKNQLKDSIKPINDVLDSIDNASPGIYSEFANHAVWDELEDWLSKTTFTKAKIYKITQANSVELLICPHQPGEIDPQCACCGDGMDNQTCEHCTVVCTHQCTHKCNGHGNPGLATITCPCCGVASAPAGCPSCLDHVIEDMVESSKILDLELKARRRSGPGREDNLKPKEATKKKQHGKESDKMEQGNEPEELEEETITDLERLVDKTNAEFASLVNMTAGHNLMNDSPEITNWNSQVTQIKNALIIKYIPYGTFIGHNDMFAVISIDENNKPKEYCGFDALYHYYPDQVSLKSMQIACHKQNMFDENDIAKYAMKTNLNIVILTDTSSTVVKSNITNEFVAIIHGSALEGYATDHWYTGRLSIMRFIDAPLCFESDTAVARLNKAAKSFSRGKINSANPLGFSKDEHIKFHLLLTRMSDNILSWVDKGLWPITTSKDVITKLRIGFSESSTDFDDLEKPGLVIEMKSWNEEILRMLVGSDENTYHSRRLNMPWNLPAQIQEDLTEQIVGEMRSCIINYLSLIYDESILDQNNKAIEWTECPLVRNQHDAVMIDVSETVIKTGDIIFVRMTGNDKPTPVQVTINRGRVVIGAMRGVMKKSVTIGVPKISAGSELRRLYALSNAETNGERITDLLLASEGILGVGGSGKSTEIAALMKPDDVTIAMSTVAINGVRRKVDESLHPNVMSVERWCLNPTKVDTLFIDECSQIRATTLACILSVTPNKLRLYGDTDQVGVLDTSKLPGTRSLLSLADLAPGLKHTKKTLRFGEPLSKELAKAVRNLEGNEEVVTNYRLINEPTIDYDTIIALINEENPDVVLTFYHSHRRFLQRKIKASTQIKTVSNPNDTNGMLLTTVHRYQGNDSPTVMVIQTRTSPQPGIESDRHYTLSAAFRAKTKLIWYTAGIYQEGTTLGEIVNGTGYAAGGLAAGLKNWLGLLPASIEPQVTNTSVRPINRAVFESTKSSYESQYNVSVNLKMVGEIDHVVIRKFGRPWVVFAVDRDINVTVVQDSFNLVTDENIKDMEKTLRQTSTMRPLEAEKTVHKPSTYVAERSTHNEQSYTYWRWLYLNCASILSSNTPYGILMTFGRCNIQAAGINDRLQSLTFSYKRKPFLTITTDSKSYAFTAYISTRWGGKSKAAQICDGLSLSIEALSNYTVSKSTWMDEVMACAPRHLNAITQLQKWLSKLSGFLPSWINYDIVAGGDWGTQVEKIANSLDHLKLPVFIPDSSYRSLMIPCVMTEIKGTRCPTFLINEHLRVIWDSSKPTPDPISGVIFEHPEDVPNLVATIINDWVGNKLLNYLIGNNHDNARAGNFEIEGLILPMSKHTADGDIVSSTLINRLGKLTMRSKRGEGLAMFLPKELFNMGSHIVRSQFPKIAINRSNYSCLDDHWMELAETTMMYALNESTADTTNMILTARPHIITQLSATNIRGLWVKTNHPVDDINTMSTYLCNEVTTTILSKHQRNQANSENNNEMNPDLISLVIDASKDGNSWFNGTTENVPLDQVVHMGVDCLKLPQDTINQFIQAVKCRELIVHIPKSKIDKDEFNTYIEFDSKNRVIIEAWPHYLVSNGTITFGGKLWKISSSFDRGLTTGFVLNHVVKNQHEWLYSPPSMLRNTYKVKIEVPSLTLDILQTTRVPILSSREVEVDSRLVRALGLRMVRGDADFTKMLIFGRIMLNSIYYTASDTKTQYDASNSEVLDTVLASYCIYGSLAKRLTGAFNIMGRKSYASDDKQNLLSTMLSATTEHIKSNGLAILNQVVLLTGLNLTTSEWMEIINRNTSNDETSFMNKLAKKHEYWKAKLINVRRPIYVINGYNGNKAPVITRRQLSMDKELPRGPDVIAKVFLGAVTSGTSFFKSSKPQSKHWKEPTNLEVSVNTTKNTGRSIMLMTIGSTGDVAPFVELANGLAEAGCQVSLIYPSGSKSSALLRKINSSVNQIPLEFEVNHHLELLSKTKEGLNFDIESTLREFTEQLNYKDLTIDKIPQSIDVVIGTAITPQGSSLAEYYGAHYLEINLMPWMVLSPFEKESSLWTRTLTNMQEPILKLAHLDGVNATRDNFGLKPMTPGDVVKRRFPRAYAIDENLIKVNSTQESTQVGYLTNRDNSAFHPRSAKSACITYGSMIEPWLVDHVLQTSRFLLEIGYEVTILAGSLVKIMSTDDRAQLIASGVRFVTGFINQHEEFQRHGIVFHHGGAGTTHEVLRSGAYSCITPVAFDQGFWAACAIKRAFGCTIKRSPSLDEVIDVTNKARIMSNKITHMEEFNPTVSINNVISWMNRETNTNIKILNTDGSSPKHSHHVYIDKPVPNHILALWDEVRPLYRDWMAGNVVWLDQPVSLGRPCCGAMTSWDWALGFCENTVITASTTFSRENPQLNYSIWEHTIEQPVLPFDTIRGPAGTATYPMHAHGLIPHETMGSWKEPEIYTLAGTKQVIDEQMWLADTAATVRPLRTDTYGRAPAPTGRCKFCGNVAWIYREFGCTNCYSCLRYLQQSPIMIDRVNRYNLKVEIGELASRRISSTDLVRNYSDDTRLSNLITENMNLGTYQLTLSVIPPTEYDPDDNGYCVRQTFYQALKSLPINLDNESARVIMSDVPIPKNALVTEIPGYAFLLNTNLLVITNSSKEAIFYLFDKTWPVITLHLTGLGAQWHCQLLMNPEPHHLMNDPELLFNSQDNVAGPVEVNCSKRERVSLQWNGMADDCANHRHIGKDDLSEIIKYIHESSMKVLGSGSALTSQQVMRWLDNFTSESDKELRNALSFDIPNAVGRLTGGNLRHVSSRGYDNRVITTRHYYGNILRVEQSPDSLLQNFRQGDLVTIISNSGILPGICYTRAGANYVILSESLPDAVSIALVIKTGASILTVNKPRAILTLPNKTSSVINIQTQNMIEDSNSGWAGVKICDRNASVCYMGDWDTRTHHNDRVRSYLNDKLNEEEFKVLNFPTNLDITKPLRLTIDKTNPFKFTVIDGINSLTLLGTTNPLNGRILSTITSSPTRNTSIGQYAHISIGMMELCDMLPRLNERFSVILKYNDNKHSIDNVKRPAMGIKAVLRSNKVRSVLHADDYQFLHDAMEDDTVVELHFLEHMTDHMNQRWWMKDDPIFLNGRLGLPKSLVVVDVQDAIWNESKQLETAETPADSDNSSQLAFDLSILRRHLLTGERIGDSADVKEAIRSCVSMISDDTPILIETLIEEFGMIGPIRWTRNMKSTGDFTPTQREGIMLLGTSGVALLDGKITLNRKLKAGGYLPSSEIDEHLQLNEKPDNLQQPNRVYWFDDAVQNRSMFTGGETWWKDTLKMNHKKEQSNQSNFRSDGLEALQIQGLKVKELGRMTDYNHNGSLKEVMAPVGRHFIPYIDSTTSEFELEEFVKPVITNLVMNIYDDTDLTSWNTKIAPKEGRLKSNELLNEIRISDKTLMTEYPEMSKPVLHRGPNQTFNAVSTRLHSVIHYRKYKLNIQEEWDRWTKVYFKPGYQSILESMQSSENIIKLDTKATLDWIKGRPGEIAIDSELVRLLEEGMALHPMNSAKVHNKLESLLKEDVVEQPMTQQRIRIIVWHAKGTSAIFAPVFAEIKKRLKMLFNSKIVYADGYRPDELSARLRVIPADTWKTGIDGAKQDRQWDRDDLKFEEHVYRMLGLDPALLSLWMASHHDWKYKGNNVSGLRDAMRWSGQVTTSLGNFIANLTWNSRTMESNFDKILIMLGLGDDNLIISKEQLNTGEIKTTSKDYYNIGVTVDQSKDVGVFLQLLAHGNESNFLSISPDIRRLRMRYEVTNGVSSATDSNLIARTMSYCMMLGDIKPVRDLCTAEGWDLPLVSYYSLEGALHAGAARHKVEYEEVRNDLNLLINYMTMRETRVVSFEHLSERRNLN

SEQ ID NO: 1369 - protein, 3597 aa, Phomopsis vexans endornavirus 2
MTPQHNNIMTTHAAKHNTNKRHLEGLSNNTSRKNHTHHADPTHYAIDMPTRRVWPKVAKPVRRLLQQLDDISDATVFNLSDDVLVGSTSNCWQCIFGYDIGANVEVPISMLKMAIIGQEDDAEHIWLQVSHNDGKLHFENPSGLPTGEPTPELFAAQRKFVANGVQGCIRLTDILAAADGKTMVGSKSVTLYERLATDLGLQGTDVNTSQMKTAVSDMVNKRSTKATTQHIHPPIILPSSTNDDVINDLNASFGAAAFIRGNRPAHPHPYHNGSRKAVTNIVMDFHPRNAIVYDIGGNHYDHLTNGRFNVHCVYTHDNPADTARHMKWVKRSADWAKRQMDNQSQLTDARRAKMAAGALDPNSTDVWCDKGLQNCEHIPKTAGFAISVDTLVHVTPTDLFEFYAEHKILHAVHAMTIPEDYMYSRQGLLKHKEGHWYHSNDGTWTVEFVGESLPYTQSKATTDKYLTTPLFDLGELMVYSKVSGYKGAHLIIEHFILPKLDIERHLIQHVTWFNTNMDNIFVMIPDIDMDSSLTLMGREPYQLKKVVINIAFYERILNRLMQAYTWDSTLSYAAGLVGRVYATTSGLHQRWDLSNTQVRDHCLVAYWSVNRINESIRPLLDQANRDRRAPDFLTSLWESVKKWAVDFGSQFDPSGSSIVQDFIRMNKGDVLRLTQLFGAASRSIESLNLATQMVHSRNIVKWNSVASGYAANSVKYNIDTWRSGLHSVPKDPTTYDLLVKGKLVDVGSRQVCAANIKCFHDHSVEHDHIIPSNLLKVGACVCCGVLSSLMPNRSCTICSEHPPCTGRLARCTHEHVYLNDECCGSARCSCVKDKQCSCCGLPSIGVNCNVCNFDPAAPSVNELKLGRTTCTTDFEFPNQMPKDTFDDTTTSTAMHTHHQSNVAATDKGEIINKDTTTHNSSNKSFSEATNPWPTIETINNIPEMSFENLESLKPGMGQPITSTNNEIVNPIVAAVAAEMLSDNNTSTSNAADQTITASPSTSSSSGVDISGLLPPDQAGMVTPSLGLHAPVISTDLVKSCSVTDISNSPTTYLSSVSVIIRGWADVAGDGLCGANALHLATNINHDEIKQWFTNSTGHADWVTGEEIALCANAYGINCIIVNDSLSTLYRVNHNNQAVSIIHGSVIGLGAHWVPGCVDINLYASLDTTREQKNFYALLSYLADKQISTSNPTSGYCMKYASLDIESILTLGGELTVSNDGIELLHRGSAVKPTLDVKKDSVKYLLGPTGSGKTTTAHQLLGKKTLIITPSRSTVIGTVDYLNKNGTKAAGRADSQWFPDNIDMAKINSNQVILVTVDAMHTALTSGNKPHAMYLDWTVSRSVVCDEVHQLTHKYLTVMTYLSTANTTFASATLPSNPVDLRCQHDTLTHFVSPDDIEDDIIDAVNVPNFVDNTAVIVPSVKLTYTESAKTGTAAISSSTQSQYDLSKVSKACATECITTGVTLPMINRVIDSSLRIDVDIMANPDWAKGRYHIVNKRIISLTELIQARGRVGRVSHGYYKVGAFSRSTPLCNVQEILMSCYAGTPCSTKHFNLWRSVHQSVLTTANTQLSMLTGNGHTDDQVDRLTSWIADYSDLLNAKNKGHQPVFVKDNVTLESVLSIAPSVVGTKTRNTRVGSVKANISIDFGTLLPESAFGEYSKRRSGDAVLSLSADNFIDLVNDTNEEISHKLINVLAADVVNTINSIRNSLVSSHNRKLADSTKGQFPVFSSMQQAESLQGRKVGNNDIVGYINERTGAGMVSQYKNMQPQRGYFCLPNFSTSHYYKTATEINSLRGVDTPIIQKLRSSVAISGPPGSGKTYAMLNEHRPDLIVTTSKSMLDKNKTWRSPAQLSGHYRSIGVDEGGIMDFVTLVTVLCHTDKVIMTCDLDQLPSNQDLAVSDLIGETSAAAAILKYGSVETLGTSRRFGPATCRLLGLTGNVVEPYNKTKTDTITGSVVSPSNKADMSEILQEVSPDIIITSTNALAREVRSYANLAVYPISKCQGIEGKSVLLLIQKFDQSKLTDSALYVALSRHSERLTVVVDLPNAPLLDRLRIDHVAAQSYADAAGGMLCLATQTRWWLADRLAIALTSDHAWLDMINAPPLEITTDWEMREYMLANAGKAYLLGRAESSRYGTYVLSYSESANDVDVWTFACDKKKYTVPVINGMTLLDINRRYLEQLPLRQLLRIMSMYVLSKLKTTGTKVGIAIAKWFESNISTCVNCYCSVRLQMADGMPQPDSTTAGGAANILSNIIDILLCIKDGVTKAIQDMRVSLSKVRKYFDGAIAGNKLKDYVTNTLYGTYMDGTNNQRGKDPSGGANSLLEALVDIIKLVGKKVVGSVMDLYNFVIKLIWPASPQTSGDNGSYEMDVMKLTRHGPADASIKRKPTTRLYKPMSLYEVSNFNGVEVMELELSEIKDEFELLFDSIHGPTSPPVIPVGLSSNIGAEVVETLINNTGKSVRWSVADKPSESSEDSDSDSNTERLHVQNVSSSVTDNQQQNCLLRKPLPVPDNLCNPKSVSRQVAENPTRGEINSSELSNADNHDGEEPQSPSIVPAANGQSNPLESQPTDNCQPDGHIDYELASDYNDSSLVGKCKKCVGHTVEATTIKTKLRFNTFKLNLLGRMAAKQQADGSISGKINLGYFNVQFNASPCCNGKYHVHASNSNSTLADAILQPVPSGYIVFVKPSDDDIDIGQLNAAVKAISAMGGDNNDSIMQLLLGVFKATSKYVSKVVNFGRWKVEAILGACELSTVQLPTNVVDSYRALASALNRHYMLRNHVELTTNGGTTLATITGTTTDGCSNNNLFIAIYGFGLTTTACIFTRDSRLLNHITRAITRTFKTRTGPESALHPEVGGSALATFRGLGLDISKVVQTLDNLDTDEIVNWITSNPLAAIFNLQNQDTHTSIKQSIEDYNMMGKLVTINMPKVERQTIAFCIPSGHGKTTTVARIRREHPEYQVIDIDEVQEQASILTDSFDNKMKSYKRKLELELRKSKVHKHAIFCHMPGVAPVDCKQVCIVNKLATIPFDRIWSKQNLENLISKSNTIHYVDGLDDMYNSCIKYINNTYSGDIVFEENKELIDNINNILGDSFVRDQPYVDDIFTMPQGPRDRLSYKENNIGSGQQRIFVTGNHVEVARPTIQNMPSSLHNAITTRLMGRVKHRTEQISIPEYHASLKKLLNKNCDKLLAAYELDTISLSVKAVLDWLINKGNKLELVTNMLKNVIRDEHATDPANINVHYKVETLLKEQVNDVLDQVGRVIVWNNQNINMFICPIINEAKARFKTLLRPNVIYTDGMAIAELNHSLRQYEGKYLLEMDLSKQDRQTDKPILQYEWWLMERLGVSHDVVDYMTSFMPTFRIKGSNGESATLPAIHFSGGAMTSLGNEIRNLLLLSDCVSSSYVAIYTLGDDSLVIMNVEPNLPLYNRLCRTRHNVVNTATWSKTTATFLQLIIARDVNNNFYACHNVSRLREKIAYSTYPNWSSDWKAKYASYLMMIGETKLTHAAMAYCGFTVFPNLGTTMSERLHANSLHNGTNEADVVNTISDIVHMKDVQSVEVKLEIPMLLPYNKLGLGRKTVGPYKESHNTLIQNVLQQLQEY

SEQ ID NO: 1370 - protein, 4639 aa, Phytophthora endornavirus 2
MSDDSWFGLLVQKYNEKNHICDEVSPFMGDGIDPALHKVMRHIKKKYNNSMMEMWKEYCASNTPYRPKLVSLGGQVYKIRDNVIGTKDPIYKCSFCNALNYSDDVANDLCGCCLGSLDIGLESTLKNTSLMRILTSLEMMEHGSNELFQLMQSGYTDGGLLSDDAEFMRVLYEHDLRLVRNAMTRMTIRMANYDRGISREQLSELQQHFPDVVWRVSPKYTTKPPMTSSEVQGHLAVIRTMTPSSHTLLIRDQHNWTGASTELITDNPVCEDGNHSISNCSCFNDANTVIVFVGLPGEDASRVVRECHCNFNNQVVHLISILPNGQHHGDIGVNEELEMNVDGDSLLCSPNHSSVTWECSSHELVVWTTKSMVIYGDMHVKCFTMADTSHTTWRTLNLTPNIGSDSQPTGLTHLHPKNVTMQVPRVNKQGLLPQAGIPAFTFETVEVNLPLLRALNNRNMNGKVTHQTLVEYGIAMAHSKYTTISRTIKKSINYQMILDHAMLSVIMMSLVAANTNLIHTTLASADAKRNLMHGVVGVGITTMLERLLKMVQDNVEEVNVTKWLESLSDYELNTLRGLHNELLGLAHNDYCPLSDVEDNTETRDTEITGMSPTPNVCAHHSTDCNHNMTGPKCICCNIYSKDKSSNYCACCGKGKKCKGAHACNHTCEPMNMHNCSEDCQHLKKPCPCCEIDTCLDICPVCNASNLAWVSDQEPLVEEAKAFKGKPHGEASQHKSTEKMNKEMRNIARERQVRERRKTKLAEDRERSIKSTDEHLRSTGELEQGHEELERAAADTHRIAIGDNRIMIDGLAVEWYAPDTPSEVWVRDIMKKLDNDVEWLECVSNKDTNGMAGILMAEFDEGAPPVEPKDDPMRIEGILHPEASVSDMPAEVEAIKLDKDWSNIKLHAGNGILSMVMYGQVGAWERHLVQAIDNGPNPGKINLSYMVEGEWSVDPKNIQLTSLIDNPGWMDKCGFYAIETSLGDNVELEELEILSKKDSWFTAEDLSLYMCDVGANHVILVEDRCTIVCVDDTDEEYTLLIHNSAVSEQHNHWLTGTGKQIGPCCPWPNISGTTTAAEIESCLFNHRMDSNAKRFDDLSMNDRKVLAADLVEFASRTKVQNTDFEQVWQVKSSHTGKVLTNNVIGSHRPRDGLFCLKIPEKFTHLVTLLTLPSDTAMLDNEMQLEHNMPVDIPAVFDQIQTQETRECIKSLIQLDICGTSRTDDYSNSYTTVWETVKVVNTRSGTTKLVGIKPTCKTGDILRCNKLLGGDKCQLIKRGGGYIISGRINPHVMHAKIMYAKVSAASIAMKLESLWHTMMDTAHTRYLLEHAQVLLAPPGWGKSTRIVNTSDLDSTVVCMTSASRHNLINRGVKARYTISAERAKLEKVTTRKLIIDEATMLQWTDVHCMITEDVEELYLYGDRHQIGVVDMSSSSGVRNDRNITQYTTNVETPSGTYRIGNPLCAELRKLYPEMIALGTHQTTFNVTRLDDLTGDEVRELVSRVKPGIILTFYQSTKNRVNRMLRGSIPVSTIHSYQGCESSRVMVFQHHPRGIRAGLHTSPDYCLSAATRPINHLEWVTVGTSHGGTSLVDLISGGDSTAGGADRTGLPPAVQNLASMFNNWILTTTNRPGDIEKPAHPSTYIDVVSNLLSGDEMNRSTEAGKFIVLEWYPPMSDFLNDNRPKPIGLGFASNVLGRHKITVTPKKVYHIEYAPALGGDYESLAQMLQETHHTIRGTEANAETQPSTEDSHPAAVVESPPTTNVSEVQREINFEQVDRKSLLMQSNFIIDHNAWPKMFEVFNDYNLRTDMTAQEGGIRAHVHGGGADVLIEQRDTTVSVTLNWVASLGLMVKTAQEQALQTLANTTQALVTDVKTHKTYQPTLASTHQQELADLTYSGRTGSQRSTVPILESNVESIPVMSVARDDHENDEDEFYDALEWKADLVEDATAIITDSQGNQKSHLLVDFPSSHLKLLKVTDDNIAALTTMVVYVPWRQTIRIHNLSHIVQFFQFGRCDFILNVMSEPVSVSVHHGCSMCCGIRFMTCDSVMTINENYYNKNNRRVTFQGLWEYSAPLLSISEHFLGRRSTGEIFHMVNPSYIDELTPLDCVSDLNLDSISMFGDILKDRLTTAALGKLHGISGYAYYARENEVTVHKACQRMVSNGLLPDNVTSLYKHINTVNALHPATVRGVRVWCIPTDTHTVIYNPNHADLQYLQPGTKVITSVRSMCKIIQNLEHLRISNIAKIKRALGLHNFDAGGEMFGPVVGMMMDMDEHIGRKTPVHRFMARKVGMLKIQALKNEQRTLYLHHELVTKWKNHMDNFDRFLSVQGITLPSPSPDYWDLLDNSWMWFCANRIANQSDLHFTVNLAFIATNGVWDQKYLDASPLGLSSVNHAERLHMLAEMERARDGYKRAVSSERSDKDSQLYKHQHLTLTKIEAQLKTRNGPIVYTDCSKSKFKMSHMNFGLHLVSILAEPESLARVGLSLNGVKVIEGLVLPDSFARSHEPFHTVTMDNDKTRILFNDSPRVLEEDTRTRMVLMTKPYIELNGSYWRIEIVNEFYNAYIVRLINENDVVKRCIIKPPTPIQRHGEVVYNIPSVETDPLKIVANASVFSHRQVSLDANVLDKLTLRCLRDRCSLNDLLNYARIMGNAVMYSKQFKVNKHQLTTTELHDHCMVAFYEAKTDLLMSKTIMKLYADLRAIDEFDVSNGPASIGGMMLSHVGRHIVDKISKMASLLHIDIDFDTVLSGIAGVASNIDRTKLLSKALKDLMNWRVKRVSLAPRFLEFNRRTIETQGLQLNTLPADNAEWLGRTFAKTVSKATSGVELPTSTSERSITKMTKLPDTSSGAISKQLYIIVCYGTFGDLYPFIKMANVLGKVTSNSVTIVTHNNLIAAGQKLVSNNVSLHGLRSGNQAMLDFLTNANNGSMTPNVLDSYITLNRELGTFLYDVTDTNVNIIESHFSRVGKLMASMKGWKHSFVSCFDTVAQNSKFTNKPKKTWNQMLSVGIMSAAAMALNFSDSDWNDVMKKMRVEHQNIVLLKYPGHTDVEPTTHVRLTGPLVNVKKTTVGHRTARKLVLITFGSVNTTDSNRKVAMYSHAAIKIKPDEIVVHCSKLEKNVLERQLNSEVTKHSPSTALTFVERYDASLYRDCHVLMIHHGGAGTFYTARILGFGQVIDPFYLDQFDWGNVAENEGVGKLMKPQDVLCSSEKLLSTDMWNTLVATAETKAIPGYSADLQAEMAVNALLNMLRVHGKEEECDCKLSPSAEEHGQIQVGNAIRTCLKNWWRTQVFTEKTEKGVEICSGVINNVWKTALSSLEKHSLLEQISKETGETDNTTPTTSMAPSRVTTHLPEEESDEETKETEPPENQNQNKEIVGEEWEEISRLEQKAAPSETTPNLTKKAKSAQRPTNVREEPKDADTSTRTDIISLDHVVRCVMRTKMTPVVPGWKFIDAVGRFTSEKPTNIRFTLKDTHNDGAGCGLNAVMVNLSRFGQKFAKDKMINLTGKITSHTVTDLALCCLLSNANMVVVSENHPTRWFVYDINWITVKIIQMEVKGVGHAEPAELDEQEMATLWKNRREFQDVMNVRKLATGPVCKRLGVPIIASNYGPTNCLDHVHLTGTQVDTVRNNAPIKITSTGVKLKSKWVYDMEELTGKPESHWISRLSLSNVGKIISRHSNPIRVIKGRKHNNGILLDGATGSVVRGGTLVLVIGMRGAVVTMANPIKDGVWLPITQMDVNPLFFLSLGTGVYPGATQHIKTVLKADEEVKTFLNNASLNRCHAFGLFNNVFRVQASDATDVIVSQFDDRKHHNYDDREFLEKFSRDHIIYTGTDDANLALNWILSSGVCHRRSLVSGHVSMEVTTRDQVLLRLLALAPPNWKVEEVPSNINQEGNLTTYQAHYFDANMTEGAWFGLSDLLGKMLQPDGNSNDAVLRRTVPCEGGLTFTAVLDGLKAISVHPASDLTLTILQSKEEDARYKLEVIKDDQEVLEKLHDLGKFASVGPLMALPNGSVLVYPFGYIINVRNVSGGNAIENVFDLRGDEDDSHGTSGSSPPADFWSTKDQLSKTAGQIMGAHDWWHMTDKTVSQTTATLREVASIMNVDALQDMTLLPLAEDNFVHRPASFWNNRIYFHFKDDGQTLQSCDLMLDEDITSEVLDFWLEDDLTDHNVVYGPKSDLKVTHQRNYGAVKTIVKTTLTRYPLYSRPVMTKMANQEVNAITGRIGSVTEVRKYNLDAITEGRKFAQVYFKEDWASVVTQYRQQPLTFDSEKTLTWIASRSDSSKIARELSTLLDEGFIVNGLDRVNVHLKLESLLKDEPITSYKEQQARTIVWQCKAICAIYSPIFIEAKKRLKELFKEFITYTDGLTPAQINDILATQGTTRYFLEDDLTKQDRQTDQQLIDCEFEIYRYLGVSELVLSSWRTVHNKWRFKGKTTRGTFDAQRLTGQVTTAIGNVIINLLVHRRLVEIHSASIKRMLVLGDDNLMFTNREIDARALRRTVADYYNMQSKAVMFTKHGTFCSLVAYRSVHGIIQMGPDYVRLRRRFEVTNGVSEVDDINIQMRSMSYCAMLGAIPEVERLVAEKGWPITLVNWYAQDCLLQALEDKYSMSQDQIMSNLQELLSMIRTPRKYDHTVTVLVENR

SEQ ID NO: 1371 - protein, 4530 aa, Phytophthora endornavirus 3
MQRNNKHSGNLVPICKSLGDGALKRYVKSTLIPDMLNPSNLLGVKYALKTGQAKWFITREQFEELKLISMLFGGSLQDQRLSKLRSVMYQTTSIGKEVVPGEVNYFEDWYRWFTGKYNNSMYAMWCQYQSSPTLLCDRIIKITAKTTMFVDCEECEASEVVVCPFCGMLNHMMEEEKTHCGACFGDLEWDFECGPEGEPITTTIMNLLQGHYGMAMLEQLSLSNYLDLSALSESPVTPAIVNHDLMIIKQLLSRTRNQMVPIPSNVSKSELSSIKFDLGTDMCCPRHPCLNGARRTVAEISWLVNNLRQGLKHEPHNHVVLDKMDLLSSVALDDQPYVTVDDLHSLTREEWVEVKHLVLILPNGRDMTEALNNKSATCQVTCISLNMDEAYYKEEWDVATVAHTNWASPLYSSATVEFGTDVKQLLSGERYTILASGKIVINSVLQRTNMLVMSSIKQSMKVPGEVLGKIKSCDLEKVGEFTIPIVDVNALLGKLGVPVLEEKTVSLDRTFLRYLINKNLLGNMTYADLLDYAISLCHSRYVLDGRERNFSRISADDCRVHCYVCIMICRLNKSEIHSYVSQLGPDNQFKQMISVLGMGAMQGLWSILIDTAKQYLSCTMETALTKTLTWMKTLSTNEFYSTDIWENIREWTFNDATVKQQYFVRSEWDSVEIVANCDHHNVECHHDYNPFEMIEQDLCTCCKLTARKENSTLCECCSISTNCHHDCEHLCTGKSSHVCKPSCSHDKKLCRCCKVATCLDVCPICNDHIPWVAPIIGVKNVLGKKTSTRSYAQPETSKKPHNKVTVPPKVHRDTFKCHGVTLGEKGCNSNALKTNKVKIEAALSKITKSELEMYDDDILANLGLYLLLDEQLIQEPELPDKPTLGDYMPAKTTDEHQVKPHDAGEESLSDAEISQTSLSTDPTIHKWLMNLSPVLRRTCVDGMLKCWGSLVEEYQSSDEIKPGAGHVLFCPEGTTYLDTVDWISIVNEVEIDGDDNLCGYHALKTSVPTCSLRDLREMSNKECWFSSSDLERYTKSIDVNLIILKDSQVTIFNHDSFNTEYALLIHHGDPTAGHWNSASFIQNKPLPKLPDWVGYTDNQYMEMWLRARGLPETTLFDDLTIDDRVRFTHSQVNEEEKLSTKTINDSLIAEWDGVTYKLTSKSQSGNNIRKGNVNLSIPEEFKDSLMLVNMEVNQIETSFEFNQPHSYSSDIPDDATQRIKQEVREVFKTIVQLGVCGTKHLPRKPIGYYDNVIKSNVKYLKDNVCRCRVSKDNIKTGDTICIQNKDKSFSIKRIVRTGKWMLFNHKIPSKRSPVKYHEPRTSLTSQLLKLSNLVRCKTSTADFKSLLKSSKAILAVPGWGKSTRIASQMDDDTTVVCVTSEAVRNLREMGVPTKQVTSVERACDDLVSTKKLVIDECTQVDWLRLFMLCGPQVSEIQMYGDSLQIGAVDFSLSSGERTICSCESYCGTVEQHNETHRFGSPLVDELKTLNPKLTSVAEHSTTVRVANLPDLDIERLTNLVKEEKPGVVLTFHQLTKTNLQKSLGRSFKVELVQDDFKTVHSFQGRQKARVMVVQHFVTPQGVHTDRRYLMSATTRCTNHLTWVTCGSPITSLKLADHLRNSILVGGGHVSIADTVIRRIESIFDVDKLLVNVRSAVDYIIGTYEENSDNQFEIKGLNNSTGKYEEESRFKFTVWPDDDRLTKYNKLIKITECKELTNEVEPTVEILDEEDRSNYYEPLPEWEGGLCYGEKTILYVGQTLPTVLLPLTFTTKFGILKLYQEDGGIFADLVTLGKTWKAQWLPEVEGFDLSGLNRMAIWSLKQILRLISVTHTLPGSINLQVKQVDLVNLGEIFDVDEVSRAANMMDDTEHEAKWSYKRPRGLARINTIKNGEVENDLGLFAIMDVSGVSDEAVYSVKLSMTITNYARLSFLADISHRFCGMVTPACIETPYGWVDIIIQNGCNPCAGLMMVSDKAWWVIDNDYQHRGARRVQFNELAINNYAIMYMVKTLKLEHCFADAVDQDVHQQAYYSVSAFGDEFWESDTPLIDFTEFVLDRIKNLTVSTLSNRSFKYHNYTEENNKWLENEREYLAQFGIVMFWCSFDELSPLNGSIMVGQTLDGEPVFTLRVDEFLFVCDCDGTADKLDDFVEILKVNMNTLLFESFKLGAKLRKNTITSLLRSANNAIFGGGDLEQGLILDLDQHKFHKTAVYSHLSQRLGEVKLRQSALVRRPFYHGRIVSQECRSQIMNCLRAGVVVDCPTVRATSTGSELVSLIMAHQLNVPITLVLKNPLLLISNSLWHCQALSLLEVMLNCTVASDRHEFMEVCGATSKKLMRSLDSYMASNKIKEATQLRAVLAKLQVTQRFGATGGNSLLKDINSQSKIMCVSHILLSEPKSLEATWKCDTNKIIVIVPGVHTGGSNWYRVSDAEGESMIVTEEGDERGITVSRSHMVNLMNQDTINLYGHPRSIKVIGSLLDYLIYECIPIESSRGILRKYWIRHPLCEMVRIPLLTTNLTGALQDKRLIKWVNLRCDPSIIRRLEIRCNRPNTTFKDLCEYGRTLLHSRDYSRLGSWDAVKIDGYSMLQHCQYAYYTSKNGDKSIRGILRILDVAMGGEKDMPLINWLRQLGLTKVLDQSLSLYNRIMQETGLNISLSQTGAELCGIVEALSQRSDCETAIEEVLTEYMPTHHKREVTFMVKYKEATKTKGAIGRLCGRVASALIQEFWEGGAAQPKSRETPERSLESQETEGKNTPSDPEPKDTIIEHSSQPETDQQSTDLSEPSQMNNLLMVSQGTRGDVEPLENLVNYFQTKFDKIFVLINRGNEEAVKFPEEVQILYFNMDGSDLAALTCDDSAGGIKQTLSALEKMVSSITTAYDQGASLEGISLIAGTSHTFIGPLLSKHYGVPFLEIQLFPWPYNSQRTGEMLANRIVSRVLEAVPEGVSHLSSRKARPRNVLLMYPPAALSEIDHNIGNSVRVLRKDYTRVSGSHRGKRCLITMGSITGSEALARYESGVFWAIDAGFKDIMLVGQQFRDLRAQNQLLKFSYLQRTAESRGVSHFTMTTYENYKEVVGPEVVVIHHGGAGTTNYMCRLNAKQIIMPIFNDQWYWASLLSSHKMAVFCIPASLPSVRMSTVDGLRPCAIWWQNLNHKYMSQTSIAMNELLSWVSNQGPSADHLTFYPYFKEAALSMLSRGSTALTAIGPVNLACQVINYLCKHVSMQLDTDDVPPPLIEDDVEEQTDSGKSGDNTSTEHKDLTPVADAVDLTEPEESGSRHGPGKPDPEKVEESKESGETIEVEHFDESEKLESVEETFKSHLSSKRSGVVLTSLSKPPLYIGEVLDWNTLIELHEQNLPNSYDTQHLKTVGPYTHSRLLGKKLENVTTLYDPKTSEEGTCVYDCLKYYLRNDKGGVLKTWSVLMRSRTWATLPDLIAFSLLARVKLILVRDEDTLIVNNKCAMYMSMRLTQISGLGHCSCVSIDWSEVEAQSWIGQEKFINAALVTKMQRCPKNNMIVLGGHNCSNHSHISKKTLQVLSNAVDVHTENDQVNDWIKTCSMVSGKTVKDLGARLSGSNWRHLIFRRKVQIATKWDHNYTNAISWDPNNCGFRPGDLLCAASGNGCSVGVLLNRSHDYLLPVSDTVGPVEFVLSLSMDLNSVKNVVSKVTKTVGVDKAVYLNHASMKYCQSIGLFHGDGLVVSSDATFDKLVISSFDNRPHHLSNEREVVKNCPEEKIVVVSEFSRAVTINWVKSATHLRCSIWHGNLFIEVESEDSVLLSLLDYISQRIEVGHNSYRWPVTGSEELVLRIVDTVRLIDTELVVGENNLVSLKRLQFRKGANPVKELKKYLIGQNLSAEGEIDIQELDTFLCTPPDQLTTSNSTQDLAEWLNSDRRLTKFRFDSLSIVKNTEIMYMVGPLLIKRKKLIEKLELVGGHLKKTVPSLNWRKMQDHVNAMNMAAGVKHGFKISQIQPDVTESRMVTLEKMGITDTLNNLSHMIRAPDMDNVESHMLVDNWLDNVCAEFNDLIVPEQLVSSYLDREPSRGAIQEIPIHVRDMWDDTSMLDWNTSYAPSNDLRLKASMPTGKRRTERKAIMTKYPIESRVVLTKAANQEFNALTGRVGNAQVIRKYNLNVEYEVKSICQTYFKPGWMVKAREYRGNPASPEPQAILSWLAEKPDCIKIGEELKMYMEDGFLTHPISDINVHIKLESLLKDDPVTVNEALKARVILWQAKGICAMFSSTFLEIKKRLKSLLRDEVVYTDGMQPSEISACLASVDTFTSLVEDDLTRQDSQTDKQTIDVEFGIYDVCGLDRNISAVWRRVHKMWRFKGKDTRGVWKEMRLTGQATTALGNAVVNLAVHWRLVARLGSSLKKFLLLGDDSLFINTTNIDATSLRRNIADYYNMKSKAMEFKNHGTFCSMVAYKTESGSVGMGPDFVRLKRRFEVPNGVSHASPENILARKLSYCMMLGAISPVVKLVKEMEWPITPTIWYDYGLLVNSLVEKYDISSTEVESYLSSLVDYLRSDTYYEVDFEVISQR

SEQ ID NO: 1372 - protein, 6175 aa, Rhizoctonia solani endornavirus
MQLQDTYGREILRPLTQSDSYPAESDGVYHKRKQGNHESSEIEIHDEKQNYKTTLHTSENHNRTGKYITRVTTKFSKMKNTERKIILATIHDELTNTNKVRGQFKLQPTIKLEPANEKENTQEDSTTEIAEPEPLRSGILLGGSNDCWLKLGTFIPHKTLFSILDLDDSDSEDDSREQYPSKNNGEIEARDFKQTIIDVYNEGKIYVPKKKKYLPLKTYAPVFNLEITFVGHENLHLESCGMGTKEYEVTENTYNLQELYDVLTKSEADYDEMDRRFLSSSIERTAPIADLERQIYLRHFNHRKMGTKAIRAFLDDQGMTGKSSLRVGTAEWEEAMLHDMQLVRSSLSRLRTEIHRGDAGLTDDEIRLLERDTLNLTIVPKKTLPNTHALAATSRKITAMMMRKLVVRSKLVDVGGDPTQYRFYNEPHHVMRPVLNHADVQRALTKPMRFNEHGSGCTHTLATCDCVAGEQFPIFVDSIYDIDMDQVTNYMATNKIDTFIYSHSFRGVDLSKRHGQLYDNKSVYKVFNNGDLVTSLSGETVSYVNNYESTEMWVSANVLVSNGIWRIYDVAAVGTHVIRMAVRMENAVQFYSNMELATKDQPITIKIPLFDIHAATLLKWVDHTFEEARFLNSLLDRGMSGDISLDTMLEFAHAIALTKISSHDRTFSLMRLTAKDCRYGAWVAFLYSRRRTHDINDLVMNLTDRLSTKYLTRTMLDIGLPLMQELGSKWLADKLPSLFKNTVKNITNKSQLMAGGKEFEQLWDNLDTVTQTKHSTKMDIRYKPGEFLSFCQHSHESCQHDGPMTCSCCKKPASKDLCDCCDNACKHKCHHEHQYGHGTSTVECECCGVLSSELVCANCDSTELDMVEMVEAVKFAYQQYISVEDLIVHVREDAHYGPRSNKYYDNEHTELRPPRDQTRKSKTLHAIEPALNPKEIREELERLTHGTTAAQTVARVKPQKKEHMVTMMADGTHIHKCSECGTHYIEKPATCDVNYKPLATSCPRCNPMSRYEMTDQDTYDNPPISKKESVIIPAPSSMSDEESVIYSTVTGVEYFSYVTKGHLDYLASLDDINIGLTPNTTRVFFPPAGFTRTDVKNFRVKTVEKITNEDARCGYYALNKLFPTNLSTLCMITKKDEWWTAIDLCLYASREDKNLLVITDNEVYIQTANDTLFHYTVIWENTEEGGHWNVGEALQVNSLDTLPVFKSVATMEELLPYSQNWSWELPTDKRLEIATKFAAIYAQDAVKVGIINNRLRTVLNKGKMYMTNNTREKHDVSQGFVHFEVPKNLELYADKVNELSQALLHSELFRVIDFTNQDPFSVDEARDAKFKLELRDYIHAMVDVKKGWVDGKTTQSINMTRVFLPTHKLKTCDIIMIKTPQGTFERSVYRATGQYVVVANLSHVGRVKVMIPDASIGSLIRNLYSLATLRVMDLRPLMSASIANYGVHGSGKSTEMAQFSQTNKVDTAAYTTGALLSLKEKHIVGRCESIERYKQQPSTAAILQIDEATGLTMLDIAQMVTASVKQLILYGDHRQIGLVDMHYGGGVNTMIEAMSVCGTINKNYKTYRTGGELGEILKIIEPKLELPEHNTKVTVKYATDLDVNMIDDMVEEFKVTKVFFFYSKDVSMYNKYSRLDSKTRMLCKVHANQGLDAPNVLVVHTASNGIKPIHLDRRYLYSAATRASEHLIWLAVNTCVDKTPLIRILQSDPRHEIREGGFLPEPTDDDEMNEALKFAGMEVYEEKFNTLIEKFCLKLASGLYQDLSNSLRLIDTSAWIDDDMLGIQLETKTAHYLILATIEEVMKDQPTIKYLEKNGSLPVNPIDEEIVLIRQSIKHNLKDFGDAWLTLGEVSQMSGNFSEKMLRYLGYVEQEELVNTPKGMCATYKLIGSDVRLIISVEDIYSLDDVIEIKGFGDQSLLSSTEVDKLTISKPEKLLATQDIHRTWVKILSTVSSMDANLVHEKDVDFSKPISLRQCYVTNRTPGVRMSRVLATRIHFNCTITLTKMTERISQLAVRKYRKQMEELISVLLNDTEKFQTESTPTSNIEEQFNVERYLSGLCKKYSLRLIRTVSDNQETWTVNTIGGWFGLHVITLTTSLLSEPDFKVISYELGRYYPILGRIIHVPVEMVEQSINDLNGFLNRFKFSHTNMMVKNQKPVTTMVQAEEGETYSQAYILLQGSVRELERKLDVRKDVALFDKVEGDTIVMKMAMPMATPEETLVGLSDFRRPTSYWNDEARKLLDDLPQQQAKLRKTELPKQTIQRGDITTQTESVYHSMVEMNPGETYDTVAYTLPKFNAQQQENDSTPEKTQTPETFTYTQPTIQPLPHIPLSDLHAITPPEPVDQTEHEILREIYGSRVIESIENTVVFEMSFPTTNQELLAERTAQPSAEEQRTEGPHGFQLPTYVEEERTSETPQKEFEPAPTEGKTTKDLWTEVELKFKSVLNKLLCLERCKRKNEFAESFDEVTQSIADYKNHCCCYAHTKSMMQKYVSAAKSRDIEDNYVIVDGTVEFLLQVERVLFEPKQYKATLREDYSQHSYILNLLNDDEILFNNWGREMFHTIDESFAPDDHSGFTQNQEASENAQDLTEKDASRKVPYTLISFEHVAEGIIQETYYTKPELNPVVSLENMNLPKIEDAFEELVDAFIAIDAATNRKNLLETQMKARRAYDMLSQHTDYETYSERLSREYYEKEPTQAKETLQPKEGGEEDQQLQEAHEQHIANRGAGNKEKLISVQALIAKHDATLLNVRSSSVRELGEAQTAGGRKSFLTEWANNLFQSLDGNLQKEEPESNVRDGLSQTMGKFELMPFIVNPKSAQQPTNYEELNNDFEQTIKKMAMILPELDKKFERFVGLRSLEESQISVSELERWEIDAAEMLDEYMAPSQQNGFNERLDLEFEARANRPRIMEWMLEVIDASTETSRMREQEATNQEEIRQIVTTWLERTSLNQSYLALNRAAFDAPVAPSNYLSDTQDQAPGPIVKYQWEKHPWLLAYASWLSNQIFESISPTKAELKRLWEDKQARLRRHRENQMELLFNTPLMWWMIKEQDRLRDRDPTKTNPTATMPQPDNDWAKYSWVFFATVKFVAEHVINYVEDGRRLEYEKYGYDYKKDKYRLISGLTTGTENERKYRKLKETYTMRKLTYNMTENNLLDHIIKNSGKEHVTEYCNYPMFGTWAGHGIKQLRIEDGMLHCLYEVDRKTVRMMRNVALMTMPFVQGELHLIPSVTFEGRKLYMSRSTGCNLCTDLVVINDDGEFVLRVGTQYHMFAYRTLRINLEAEGVYEALALLNIKLSLPHILNTNPLADVDRRPNLLYNSAGYDIFSVSGEVIVWLDRLNTVKDTKGALLLKMFGFKQTTGATFDFSTRKFQNDNELTKKKILTKLNQTNHTVSAKDLMSLNFQNLTHYVFTFTSNRTGKTYFAYFDADDVFNMTPAREDGIIMTHDEMYLDVQGISSDAQRFMGASEWTRNLVHTNIVALRDVNWWVVKKLISVISTGYGPFDNLSIPFEQHRQLGTSVFKLIDAYASKLNVTAERGRARRLYVGDGQLALIKEVSPDILKNMEIEEHAEPAFTSDNLETLDTLGLEMVKRIAGEENFSYVGSSLVSQTLNNHLKCSKHVLTGPYNIDTHAHQLRLVRPYLNGLSSMFLNHEDEKVKTMGEWVSAELDSKHPYWSVNHTNLRPISFVSSSSLEKDLSDIIEMAPPNAVLYVMMPQEGKFKTHSMIQQKNTFKLNYSNNKPVITINEANKSKLEQNLIPHCQSRIVYGAMNHVVFEVVKTDLKIEKIFYNANVQHTASKTVTYSLPIIDVSMRNVHELKIIKYVEISVPENVDRLLCIRAQRPGTEWNDQKQYARTLRQTTTYNTKSTRDLYKSTSDEMLLWAAATYVYTLGEMDQVKRAKDFWTLRDDHSPGLATGLLSKLKDMLGGIAYELSERLTGGKSLLKLCTEMIEKLEGGDESVIGNVLRIIDAYQVKRITKLRDIYENYASREEDKPYSKPHASEPKPKPVSKPLGPEISIDVKHLTVLSGTDGDHDGLKQSVAHLKPLTIYHDKTESAIWVQMMNNLHNNDILSNVPLLSRQCAKVDLDKKKAIANATVIHCTIFDLNTAWMAYNMGKDVKLYNGFPTSVVSLENLFKTLNNEWIDSIAGFVDRQANLGAEYISLASISVHKSVNFLMWHRAAVLDAQIWVQEPLRSLYIMQNKMKAHKYTDFYNKRLPGPTIKTVGVFVRVGPGHWALSIEQELYLKTLSGSVVMSTKNNDVRIDLENSHYQLWVHHGGPMSITDCFIYKQPFLCLPHAVDQLTNTNLLPKIFDFRWCMLNKKSLREIIEEQMVEINNFHKYRPAPKVISVSENDQDKLRRTANKIIANLPHNTSSVGFLTTYSCCELAKDKKVDCLITLTDVDYPGAIRLPEEDFIPLFLAFLLEMQTKPSVLDHIHTIYLGVGAGAMEKLTQVKTHVDELAAIYLLSDEKTFTGLVITTWTKMTYDDVFDQGDPFDWLSRQHVLKIETEGSIEIAVPTKSIKTKKYTEVVNKVKQLAEVEFFTTLTDKWRPVGWKKNYKYAFSTETGWRIEMKENAMTREGENVKYTCPECESLVTLHNSQVQNNTVQAGHCKTCYPTGLTEEQLKDKKNQPKSSNQTTGKTKENKKLENEKETEIQDEGKPSGEKHTRPRATKTTKNKEDTEISTKQSNDKIPSTADIPGAWPREEPDLTTTPREKVDMEDSDSSQTDSQATIKFAGHENSSKSEESQTDPREYELGHVRHQERQGASSQKLSPQDIEGCVNPFKELRFERLEEWTVRQYRYKLVREVYSPQSVVGCGSDCLLQLGITTETTIGTTLEQVVGICLDDRRGYAVLDENLEVFADCDLNEGDMLVVMQLKTTSWQAHWVISIVSVGVEEKPELSMQARSQAIIPAHMVCAEKKTICYEVKGYTKNGCVDHTHDDLTKEYNYYLDLSEHQPRTLKRSKGEAQSLVRKKETLKHRFETMFSPVRRVIALKVNSGFVVRGSFGSHRLVIWHCQGEKGLAVTCASAGQESGLYSPLAPVVSGPMVVVDVRCDLLMLKVGRPKREVITLDFTSKNMVTALNKQTIKAAKLPTDTKIYNGVGKQLYVYHYDNYKHHEKEGRRDETNVLTQALDLDLEIIMPNSFDMLTLELIMFSAEKDFYVKLEHGRYMLVHDVPKMLKHYLPLTNTNSPMEINTKEEFQLVRDLLLHISDFSGVYKDFTIKSGSTLSPSEVHEHFDVDEDFSRDVVCQYEDIELIHYGMDTPTGARHELNPYCVKFEPVPHKIHDNYIHLSQSNALEITNDAIIASAITAPIVNLVNQIENITGADTDEAESFIRWKFGPLASTLLEDLNEYFKEYEINIASSFDYASTIGNMKTTLDWEVFFEEQGLAFKNNAYGTVSDELTYVGSYATPENFSDYQEVGNLWIPRLLIMLKPLKVGGYKPEEDRNLWFVENGQTDNSMQMRPSKRPKPLAIGIISSGGGKSTLARLDTRIADGDQHVLLPAIPDPAALSQEDWYLRNEDIKKQLYSQGTNLEGKMLLIWHPDNIPELWRKTVPLYIYIIDDISGERLFSLNNQAIKDWVSNNRDYTPKPTIKTVTRPQLYPHILKEVFRAEKYNKKEIIAIDALNALQLVDNPTVKLTLTERPLVKWMLPYVAAQGTNANMLDGFTPTPENVNIQTIDFFSTKDHRDWMQINLPKSEMLIKSKEVYGGLDVERKTTLTKYPVASRPVFTKTIFSTLNSVTSRYGQVTTYRKQDLNISHEVNQIIKAYFVENAEETINSFKSRPIGINHKKTLEWLDARPDRNKVVDDLREILQQGVEVNPVTAIKIHAKMESLLKEEVIDAPEDQKVRLIAWQRYGLAAIYSPVFKEAKNRLKALLRKDVIYADGYTANELSARARTVVGTTRFFESDLAKQDRQTDHQDLNVEFGVYEILGVSKDVLSSWRAVHNNWRWKSNLHSGYGDAMRLTGQATTALGNVIVNMAVHSDLVLKNRKEIQLVLMLGDDNMFMCSTWLDLEGFKRDTAEKWNMEVVPASNETHGTFIQLVAYKTAEGTVELGPDWIRLARRFEVTNGVSEGSEENLLARSMSYAMMLGDLPEVRKLCTEQNWPIEPFSWYDPMRLMHALCAKHSMNEAAVLSRLSHLIDMMTRREATTHEWEVPVAITGRKQKFMI

SEQ ID NO: 1373 - protein, 4893 aa, Rhizoctonia solani endornavirus - RS002
MNDLHLGGKNNCWHQAFSVIPMWRMVINELWLNQPAHMGDLFDMMQTLGKITLNGTTLPLSREDVREFLWFKLSHYKGKVMHLEHMIPAIERPDESYKSMQELMNAASWCTQKAAEDDEFDPELDEHVMELFQDDVLYNTRPNVRLTKRIVEREFITMDYSTGQYGKCVKACVDMYPGYVPKPIHRALDWMKPESICYCPVGHKMGGQCLGLCKSDDTRMGAKEILEFVRREGLSGGSGLMVGSEQWNELVAQDLRKIKTILGRTDSRIISANAGLTVPQKLAIEEGFPDVHLVVRRQFPNPHAFLATCRKVARDFILRLHKNRPMVDIGGSPDKYRPQDFTVRPLLDVSDKVRQLVKPTINGCAHRVGGCTCMWPENHGTMLIDSIYDITADELLNTLATRKVETFYYTSSLYGVNFDKATIQELDLDQGYVQILGDITTTVLTGESVSYENHTPTARMWTEDDIVSSSSGVSYRIHTLITVGNFCLRGAQRLRRRTDIYSQLVVSSPSVEKQIIRLPIIKQNMIVPGIELYYQFDVDSNPVLNWSFIEFGLDQNLFNQMCDRNFLGNTGFNTLVEYGLAIAASKYQMHDRTIGNEHITAKSILCHAVLASAFMRRKNARTSEMAEGLANNGSFQQVVMSMLMFATHAAQDIFTTLIDQHSIAREYLNKLDRLMSNTAIQQQVDNKWLPVWDQLESKFGTKVVNIKMAGTNKSFKSCQHHYPGCTHIGGETCEHCGEPSVGNLCTCCSIGEHIHTCHHPCTFGHPEDGTAICTCCSFLMDEKCHNCQPTDISYTTYNEVIEIVTEKAQLKTKGQVIKEGEHTHTCWCGKIIQHDKQCNGMEHYEHNEHNDGHMFSLGPQVNRKHQHVCARGHIYTHEHYNDQPDHDHILENDPDCKICNAGIKQKEPKQSKDSVGNEEKPGTKEPETQGSKSENKTNDQTPNGQNDEPQSSETQEQESDMSIKMTAELLAGTSVEYMELMEKGWSFFNFNTSEPNNMKGRVAFMPAGVHVMDSDNVAIRRRVHIENDDLQCCRLAFNMVTGLKTTPQDWNRVTNKLELWNAIDIIEMAKLHDISMMVAAKDNVVIYKVKHDDGEPCSILITENEDGMLHAEPCSLMQLGPHDAWPWMNSEFDEKEMSKICGVENMPLFSETNTLKRIELSWKLLQERLKMQSMVRDIKEDLVMVKGQLTNNQGAVHKPDDGLFATKLKSEDEWIIPFMTNPTQGDLYKEEIARVDSLDTDALDVPSQRTVNIKLLVRDYVNESSTPGHGKWVNLKIMMKDGFCILPNIQTKAIKTGDRIYLKFGSYSVTRFVIKVTQKSLYLRGIPTRNNSTVKVYYPDVSVGSLLRKLFRILQHSYSSMALHDLLQNSETHDGVAGCGKSTKIKQMIKEGEIATAMTSGALDSLSIKLGKSKVISVEKLLSIQHNYDVIYIDEATSMTPFDVTLIAQKAKKIHMFGDTDQIGLSDMHSAPGDRSKVMAMAYAGRKDVNPYSLRVGNPLAAEIGKVIERFKTKADHETNFNTLWEESFIASKVVDLAKENSIDVIFVFYKKHYEDITNQLNLRSRTERTKIKVYKVHANQGREGDNVMVVQGGVSDDFRGIHLDKHYTYSAATRAKKNLLWLSIGCYEQSTPLNIRISGVNSALRGAGGGGASWFKLVEDKMAHELTADIVSDDEVPLIILTTIKILVQNLEHSIPRHLTYNLRTVDTGHWSCKITDNLLEETATLTFNPTGMVKYEGEQSIIDEAKECLTFMADNTGFGGAWVEYWSKFGCVYDAGLLNHTIMATAAWERLQELDVECNVISDEHESRLIVMADNPIMVKYNDRGINSIVAEDPELPAYMHLIKDATQLAVDLAARHKSEWVSSYKRAIKQKETETLKVYKHEVTPNTETASQNTIDYDNLTKKAIFEVSEIMLSNTPAMMRGNIKIEEQIEELKSDGATNPPHIDGYMVKVKVLSNMFMMSGLLFYVAVKMIKVERFGLPAIDVNVVKYSTTSLVEKFLPKGATRDNFNAKVQGIVDNLMKEANRHTNPLIDEMTEPGLNPEDLEQQVDVLFDDQGDYHVPGSWNQDDVVEPIFATGWKMPTTDEPKEMEYEPEPLDYESINRKIANGENIMTLISNTTKSIVENTKKIIDMPNVGIRNKVGAILSLSLTENILTSTKNADVKFKSPFFKGLWQIANWVDPELTVESMEKEAKKNEYVWTPEFSVEALDSLRKSELLKEQINAQPKIRGDLAEFGCCDGCTHEIDEWNAKYGIHPVTGNETLIVKDVWIPRKTVTIMRCLNVLNQVRLDSSDIIVDGVEFTLMGEKGCSACGGMVVYYKNQVFLNIQRQYTNLVRRKIYFSPNAIKHQRELQLLLMYLGFGVRNKHITSGIPGYLPLEFKNLDMEFNYVNQYGVDLNDRELETVLLTERVIAFFKGCMGKYQTGEKLPNIMHTWRDNNAERILDINESLQLHNLEGNVLSSPFTSQEFYIHHIDGHSFVILKPGAKDECYMFSERIPEWIGNTAHFVLPYHSFQRVIATCEIDRLRESTPTMAKKIVSLWAKRRGKTILDNLAIPFQQHKEHNTIVYAHFRRKAEKISVMEAKGKAQEMFVPVGGVKFLEMADPGLVDDIVVIEGGALATDRGGDVIITSLGLKWTAQNYGKSVHIVTAHPTILTMNSMWQSVTSPPFDIIRNDHYMMQVEFAKAMHMEIVGGIQNETEKSQLETLINNDGMYLKTPSPIVDKPVLYVGLELCAMSLDKIISLSHAGGKVIVGLVPDLDINPDVAKWIITDNIWMVTYRHSNLTYTLNPQSVHRFINLPSSRHGEYNLYSKIKYSLCGHWIVELTVSKDHIPFGEHYMAVHSGMNSSYIEYEIPKINASLLDIANDKLLDTEKVRIPTKIANRLARRCLREGTTYEDLLNYCRTIRHKMMYSAFGFWSNNQQTSTQANGWCAAIYIETLSLKNSMSSTRDTFFSTGTGGNSIINNISDRLNDFLKGGLAVMLHSTGLDRNFTEFIEEAASHLKLLFKDENKIEWLRRTIEKTHSHKLQSQPRMLPVNDHNLATIKMNLTLARIGKVSTWGKLIKSVVKHKDEVGAEDRATYLRNLFVHNLRSVRPIEFAQTHAKTIHYPSMNPRILILKSGTYGDRTLIDKMTKKLRTMPGVSYLSGWKSEQVDFGALGKHIYSGNFKNIIEEVKAWRDTPTGETARPNLVISGIWDVAAFEFAKYHSATWLPICGFPIESRHFPMLGVNVNPKAALTGLFALYSGLEITSKLSVLQEFQACIDNAIVCAPQTLYPHVPKKWWHEDYSAGEVITEDCILCHVPLTDQEKERLHAYNLPIITTRPVDVKASKQHIKIWVLAAGYNSMAMAGKESITMLLKPLYADQFHVAEMFKEIKLDENEGIDIEEIKQKNRALNDRYKLWEESEETDGIFDEVIKLVASDGMVRFADQLLPWEETQTNDIFNKFRVQGPIESICRRLKQYLMTRSLISKLHLGPLKTPRPDCLEILFNNEVGANRTTEQLRIQDVPNNKLAILKLAIALQPTGLTHYLGRDVDNVASQSTKIWLQGASILESQVRSRQGGLTTTYVAKSKAHYSLTKELDNYDKPEYSICKYITNKGHKCFELDLLNWMNKKHPHMSVKIPVSEHITVALGEMPKYWDELNTQPFTTGADAPNDEDDGGPQGPDEGWGGEKPKWGGYEPPGDSGGKNDGSEESESHHDEDDDDDDGGWHVEPEDHGEGLTRRQELDYQEHLAQTANEPEHVDDPNSSDEDELEPQHMLDLTGEGPGHTRTVTEMNHNTRRSVLALGNLPMLAGPFEGHKIANDVETEVEYDPETETGCVRQCLEKGTGKTLTQLPGSMDAAQIIEACYVLKLNVNLVTKGKGMLYKFYSEPRWVTLDVSTNHCKLLNEINIIMRKQIVYSVSNISPYETVTINNRKTYRWAPWHFEEVIGTPGWTEQRPDIEIERMILNVDDDVEDCPESQLFNNGYSVFKNSFRVRNLDLIQTRITKPVRKTTITATEWGAWSPDTCKSVRLVGLLSTDGEWKLCVEYPCGGTGYYYGKPVNCPTGIIMDLGTNLHSDPLSRTNISLGPKYYNAETKRVMANVIPGNATVGVSTNDVTYISSNSFRKHHRYDHTKLIEADYKRLIFKGANMTERAWKWMIEPKFGWSEFDEARFFYKIEISNRDPQKIKEYMEHMGWVESRRNGDTRVHTVYITVFRRELHISSESHDEVEELSDWMQEQISHCDVDVSDHVRMPKRKAIADESELLEFGFHRPKGMYFMSDINGYTDKNAEVKGLLTCEDSIDVEKPAGRGKTSLQTEKLIQPDTPTNHTIKPSDNKSSNNTGTGTIKGKENAATIEKLNWFNEHELGVRAAYSLNVKSSPMGIVCISSGGGKTWLYFNYSKLIADADKYVRLPVIPDANNVPIGFWTERNQLVREQIYRAGTEMTRKILVIWHPDNVPRQWANVPLLVITCTDSKGERLYEMGQESLRQYIKSHPKVAHKHIPREQNIVAIREHFKIPLPDWRGDIMSELQFKDIDILDYQTSNIGPTNKTYMPYLEPSTSKSHLVEDMVGEPDQYDVNTINLFELSDNTDWIQRIAPTSSMIIGDKATFTHVKESEKSTLTQYPVWSRPVLTKIANAEFNAVTSRLGAVEIRRKEGLDAKTEVKSIASAFFKQDWVDQSEKYKSKLINIDMEATNEWLMGRPGELGVRNDLNDMFEEGFHVHSLRSVNVHAKLESLMKEDTRINLLEEQKARIIVWQEKAIAAIFSPVFLEAKRRLKEILNNKTIYADGLTPHEISARIRLAKGANRIFESDLSKQDRQTDGPILDVEFAIYELLGVHPDVLRTWRTVHDHWRFKGRKFSGFGHEMRLTGQATTALGNVIVNLMVHANIVNKQKEHIKLVMVLE

SEQ ID NO: 1374 - protein, 5538 aa, Rhizoctonia solani endornavirus 1
MNQEISPIHSTSHPLNTHTHTHKTPFTLDYKESSVKGVKMDIDYLIKRQEYLWSKYNANVILDKMSNLKLKHKYNKTKGLPRCVYKANINKGRRLLRSTLKKLPKNQRKQLNKRGQIKQGSATPAQVTLPRSRKNAFCLNKLTGVRTRSPYSSGLQSGYYHVRIGSRRNDPINHVDTEPFTGSILANYDRTTNSWMVDGVDDIFYRYKFYSGRVDMNTGIHKMHKYVDENGIEYEESEQYTEKLIKDNLKTSYTDDAPFTQGELSEFSHINENQVYNTSIPGLVMFTHRKIVRLETTMQFKRPVEDPLTFLDENGTYTIPMAYMVPSVHQENDVTGYDDITHDFGWMYQGVFDYDKQDVNSPMAYASVLASFKHASFNLEYSENKLKLVEERTPKTLQSLLMYLKERGNKTFMEYVSDSKRWLHLVLAEDAHGNPCTNTKFKDYKKIEDDFALGYDMLAHPYYRNAQGPTKQFIPSFLTTATLFEMIYDEDYWYSCCNCNENVFVPQMVSKMRGMFKGSSLFITMHDYFNSLTCPCCNNRIFTTMPDSSALVTNTGLPLKGLTDPLHWMDEMYPGYVFGQSGNASAIVDEHDLRLLRRVLSMGKPMMIHLPCEATNIQEIQSRYKSVSIIPRPGLLHNHGGNATAELYALVGTAAQNLASEEFCTVSVPPMTTVPQNNNLESRTAITVFDSVKAKSGILALMDNGCSVIYCVTPSMTGTLARRQIGAYVAFTCNATDAPWVLPVGDCNAFDSTAIISTAKYTYINTMVRQGIYYNLVCLIKYAGDMGPIEVQSLRTNEIKEFSIPFLNPHGTGNMLGYGWIRKNVLVHKRLLSVLVRRNLRDGDLSFDSMMEAAIGLAMNRYNLADRTVKLINIDAETLSDHVVIACLMVRRMIMKQDKILTLMRADASWSNVGEQMLNSVAAITVGTMLQKFNALRKYANKLMQFHESAMLSDLDAVITDMKNWVKDAAMDEIGKHTFDFTPELKIPTCSHALGPEPENGAFMCTCCQRKSHTLTCSYCTVMPTSTTIPWNDDMVEEKAKSIGPNWREFVSSLHDPKDKMSHPSKPKQPGPFTKPKENTGDKTLQIPNTDNEHTFGAKNLAPTYHVHKCSSCSALYAHRLRKPDSPEYYKIGEKHHQYLGDCPWHEGCTTSIKILETTPGTFEAVPEMTNTGTSADDQMELAKLTSVEWARTLAEGAGTLWPGTLGLRPILKGEHDIRNHYKLSDAINYPFNDATCGRDALNHLYPHISKDQIAIVVGRHDRYTQSNIMEVAKACSLDILVISDEASVLARYGNGAQMKAMRITRVGGTTPHWEAYNFELVTTPNVPCSYLEDITENVLQVAHATLFKKKWTMAEHSDERIVTELRLLKSSLGGKAIVPRPIYKEGPTGGFLTNNTSSLHDLTKGLVHVQIPNDVSHLLPYVNSTSRVDLVSVNLGGSVDISDQIEGIHEERLSRIKDAIRSIVDGFTTTQAEVEPNDLLTVTTPFTVLSKEKIRLELPQKHVFKALDLIYLRSAGGFSPMIINPISAGGRQYTDIAASMPVSSVMTIKYRKALSVASAYRALTGLIKPPPPVEIIKNVLVRSNGILAPGGYGKTTEIVQRMNADTLVVCSTTMAQDVIKEGLRKALVINNQVVSEPRPELVENVISLERATYQDIPHKRHIIVDEAGMIRPYQLLTLINPESDYTFYGDDTQVGYIDFSTLGGLKASKSIFDYLPQDNISVKNTQYRVAEPLCLEIDKVRPAGYKYAGEMVETTDVDGSSRMESKRKTNFDLGYMHDWSDMAIGSMISSGRYDIVLVFHNDDVRAVEQAANKASTKVAVTTVHRSQGGSWRRGLVIQHRYSSKSGVEVSPRHCMTAATRFTDHLSWVSINCYENADLPTRMGKLGVASIGFGMMDKMKSWWSNIKDSDYIADCADELHAAAMKLDNWKPKVVAQETGFRQWAKYAAMKSKYESKYPVSVTVSKGIDYDIVTIKALGLTGEIHIYQDKVQLIRDMMGMIKQADIDNEMRADPELSQHKDPYSELTGLTPQDCHIKHLIHPNAKCELRIIHQATVAIQLAGGTPRIKLGNIEYMAATTAHTSPLNLCFISTAGATYWISDINEHHVVRINQSWREDDSMLDWLAGKQLVLNIDHDEMTLLMWFKQWWAHMYLDAKKIVNTIKPIFDTDGPFSASNNVYIHDVENALTNDITTDYSLSVTPSMCASFDMLGMPLSVYDVKTNSHKLATLTKEGGLLVINKASTSTMYMMAIINSAIRHMNMGWIRKTMRHLLWGGARPLQGKFMMDLAKHVSAGDRTGTALLNAFGRELVASVKYEPKTLVLHRAEDDDTNKFFRKEHNKEQVIYTTFTIPKEARFIMITRAVLHSLQTTEMNLNVVDVDSTHCVDMSIWHWTGVSQETMNGNVKLLSMLEPHKNNSLSNAANMQFTSGPKNPKEQELSEQMELTRKKALISINDINNERGLITNKPNRDCPVFISPQCLHHDIEVIAELVHYHGYLLTYLPIKSARVVKQGSLSNTAVADLQHGVTYNVPKWLIDLDHTKLAVTSMFELTVTVIGCANGQIIMRITRRQFADEFRLQIDDGLADNIVIVEVPSVSDNMLDDLLKGHVNIIKLKIREGLWRRIQMRMLRPDTKLNDLRVAIRHLLNNVEYMITHQRAVESGIDADDGASLALACYMIYHHKLRSHREYVMGLEQESEYYLQRSLDHAKKLGLGVLGTILKVLGADKEPSVVVKGLLEGSGISNSLEILGKLADSWDSLLAKDYSQPLPILLLGGKTIATMQMNKVGYPTEGLSSFVFRYIHLGPTLARRARGQYDLYKAPSTSIPRVTNEQYLALEMGASLVPSNSIIEKLEDMGWHKMKEYVKQANLPLAAKTYLSWIMEQQTLSEKDAIELMHKYTTSSETDKVLATISKLQDIVRLALASNVGTGSTWLPECQWLCKDFRPAAAGSEAAYKMNEALINKFNRVVEQCTLMDPSSMLLVATVGLQVSALLKQQPEQKRIWTDVQGMRVGIVTIGSTGDHLPTLSLCRALLAHGALPTVYCPRESAEIFTNQGILTIQGDWSLESNLKLWNNLTQNLNVELEKIPMTLGTNWLQGTVFEDTQDLWISTPIAPQGLMVAKHFGRPHIYFSPLPWALDVTEKENKYLAVLKETAILMMHGELISHWLVTHNSKINFSDLLKDTHPIMYCFDKRIISGTTRNYKPTFCGYLGWNNPWKKEPHHKGIVVTFGSMIMDHAIDLAQTAMMAAVSAGQRRVFYLKNEYLNKEIEAKAKKNGVTLEQWRGDYYERLTSEHVVIHHGGAGTTHAITYTGAKQLIVPVAFDQSLWAHLLSTTGRARAAFRKQDIESELALLISGPRPAPLNIDVETVNTWLNESLQSSLEHHFPHVTIDASVRTFTLAQERKTPLIKSINNRINIPMGTTDNTIKLPGYYFGRLNVETSVIFDPYSVSRPDKCGYDCISFITGSDQNDVVNILKEAGIKDDVYTSDYVAIGHMFQLNLVIIHEGAVHAHVHCPSWKYGYIKAERGHATVISPVPLTNLRLIDPNPVQIGEVGFANTAQHCNLGPTLQINAGHEHGHMHSTNKGFVTTVQALLTSGRSAKDKSLVSHSIVEVHAAVSVQSALKRIRSTNLNWPALARGNGETPAYLLPETTMTDKVGVFTVTNRKLPLGKVLIHERDNELHASVAWLADGALGKMTVLISTDKLPPYCVYNVRAVMMTNSTDYRWTEMDTAVYSLRHDIKLVNQVLKAEVAVSIPKQATVGTLYLMNFNNRDHHKEGGFRHELGDLAIADNNVVILPDNKSDVYYVQQMRSKAKVSPSLYMGKRVYSLPWFYTSTFKAQSVGIDPSKYHMLSIPYHDTHYQSVFLNTPCLPHEFKGKRTLTEWADMYVTDVVGEGYTIEEQAIGLLSLVNGKSIEEIFDTINEKLPHAGQITWANQKETLRPLSDDEIIDIMVKCKGRLIDNTNIVLRQGEEPYLAWERSIILEVIEEALEEAVRENDYDKLSWEWSGFDRVGATLTAMRQGVHITGKHGLRQITLGVGLPVYTTTMSKRDVIMAIYRRYRELATSPLYDIDKGPDDLLDQLSQLMLSTSEFEVTDKNLPIVWMEGEYINQRQIIENITEKGEHANLIMSRYLTFGTSVNDDVFFSIDATLGKNMTVYLDTSNLDEDDIENIMQARERMMDYVRHLIVSYMDNKTLEAVFMFNADDSFMIEHHGKFRGGCSPNVCRLIAEHMATATDFTETSKNYYWFKSPATNEEKIYEMPLTLVTKDVLNRSIYLEIEPRLRDPEDFDYELAVKIYSMEDDTQTDEYYLEYEDIHDLLKDEVTNLRPIPGTLVKMKVDSTEFIVGTLIEKLIEGDYKQAAGLLIAHHIAQPGHTPFEYKLDLKGIELFDGDLTHAGTFGSNEWEGWQSMTNKCGYRPEESNEWRNSDVSDMHNLDYERAMLRVPRKPLSLLHIKAMQLGTLILSEELGVIEDTLINDKPLLITAGVAGKHTLELENQQFINLVPSLPEANDEHNGLWFKPPTVWGRRRELALWRLIALTTDIQKVRVTNGRDFGNLPEPSPFMKYGVIATIPQGVAPVYLGDASFESFELSADFLLKHINAAGDLYGTDELMLMKVLMENRRMSSMVITPDKPTYSLKASWFTRPVYCMKEHGEDSTPLTRGYSSVRPGDIAQLHLPWPGSNSPSVEDHINICYWRKLVQHTPTIVLSDTLPPVMDAPLWFKKESFLGVRRFIVSGREDVTQDYWRQNTKSGAKLACIDTNQVLSCLDYVFTSNLDFIYHQQGTTLLPYLYAQQLTGLKGILEEKVGLMGQSIADDGEPADALPEAKDVRRMNRDRMLTFENESIKKMLSIGVPVGGWKTTLAREHPEIFADHDDYLDQEKHAALHKAGEWDKLSIFQKNAVIPKDRVLLTWGSTTSPDNRTYLGSVINRRSAREMGLPIEEYRLNLNEVNRIGLIAEGNYNMISTYDEFKRKCLGLVEDALMGDIPALRANMELADLAMMTFRDIEYDGSFGEFDSRDLYIPYIPPIIDETHDEGIKPELEDTPLDVINLYEDNDLTELVRVMAPGSEPFRKPVRSTEQALRIVQTMKHTLKKYPIRSRAVLTKMVYGELNATILRMENKEVIKKIDCNPEYEADLMAETFFNLNEIKYGTINYNTAATLEWIREHDGSAELEKELREILDEGFLEVPLNRVNVHQKLEALLKGFPTKAIGQMREQQVRIIVWQSKAMAAIFSPVFIEAKKRLKKILKQQVLYADGLRPDELNNYLRNIEDDNLFYVEDDGNKQDKRTEHQMLLTEMIVYKKYLKVADHIVDLWYQAHNAWSYKGSWVRGISDAMRQTGQATTAIGNVIVNLIVHTRLVRSLGNDFICMLVLGDDNLIINRSWVNAKEHEKDSALRWNMVQECETLPSHGTFLQMIVGPDGNGRLQASPDFIRLRNRFEVTNGVSSNPENTLEARILSYALMMGKTARGEKIIRNLGYETPLGNYFNHVAAINNCAARHGVNADLVRNEINDLYTMMENKQLMTQTWTHFTGVSRF

SEQ ID NO: 1375 - protein, 337 aa, Rhizoctonia solani endornavirus 3
ADLFGKKLKLRDVEHDPVEDAKLFAATYFKEGSLAALPNVSIDPIEVQKWISERPDYMKISADVLDLLSSGLDVLGIDKVNVHMKLESRMKDATIGALHELMTFNADNKMPETTEEQRIRLIVWQRKGIAAIFSPFFKQIKEHLKRCLIDKIMYVDGMTPQQISARLNAVSGDVMFAEDDLAKQDRQTDHTLLDTEMHVYKMLGGNSSVVDLWRNVHNNWRAKGIGLKFTGDASRHTGQATTALGNAIVNLMVKRRIVEKQGPALKLMMVLGDDNIILTEGPITAEDITMQSARHFNMRSEASVNMHNGGFLRMLIYKTNHGNLECGPDIVRLRRRF

SEQ ID NO: 1376 - protein, 6719 aa, Rhizoctonia solani endornavirus 4
MDQSNQEQYTHTHNRLSTPLPPVAGDFNRGEKRDAALPVAHTQINLMEEHDSTEATIVPRVERIKIRSNKAQPIMINRTVERGSFCLQPTRAVEIPKKPASVRTRIVDARETLLVGGDGDCWYKLWQPLKRAGAVKLFQRAAKAFVGANPEKYPSIVSQNAEANQPIDLEFIIRFVYKNSYMVMNHSRLVRWYQEFSRAKQAGDQVKMDKLKKVKPEEDAVEYNEYVQTKDGPDCKMADLVLVALTETAEGLLHIESVDVCGDRETAYSRLDEDIYPLEYLMQMFIKKRKERQLPNDIRDEVANEAIKWHSSGNALQLAHNQATQLQKLNIRSSMERGFKTVLLQKIMRDKVKVGVSASYLMRSKFIENLEFALDDTGVREYLEAVTDHDMRVVNNTFARVTFNHLRTTQPDKRCDISSVKELDSLFIMQDEITHEEPTERFLTDICTAFTFVNTDPEVTNYDEELLAGLHSQPYYAKYLEKLDEVKNEHERQRKPLVLVSKQPTREDLLSYDLVFLIGPVIGHDSEGSLPNELGYYKWMNSEECHYSFADTTKSKSCGFLSGVLCGSNNVSVNNRSVTVVARRTFDAMQVVILTSLAYQGVQVAESTVREFEIPVIAPTSLWATGIPILKTMKCKLNNVLLKRLVNKNLTGKVSKELLLEYGMALSWYSYNKRGVEISDHKLDPWDVKVHVYVAMVLTRREALATELQHQITKPGLNAVLASFLATMVEATMSNVDTKEERFQTMISSIMDKLKTPNIKSNTGVILKNWMSIDFWTLRDEFEVNKASAIVACSHHAKCPLEVTGNMCIDCGYLTAAEGEEWCVCCDILVCQHDRPADQFGDKVCDCCGDPTNGTTCGSCAAIKGEDSITTMHNNTACYNFRPTTTKAGDGTGHTHTCVKCGNRYSHSHPYSNLQHLQTLEECDWCHGRKTTKEKGKPGKAEDKPIVKFINAQGEVVESTPAQPTKQTFAEAANSELPVRAPIELMNLSEYAVYLPQNAAAILMGEIADTELCWFSETETSTIPFVCMDHPIEPVSNFEVIVESEESTDEDCGVACIKAYVGAEYTQTAGKLVTGKTKLFSGLDLAKVLNQYGINACIIEPLGVVFSRANDSEEFACIMHKDLSQTQNVDHWVTCKIKRIAYVNNDKWAMPLFSPRQHNMHSTNLKKKKYELLDDHDKLDLAFRVVSSMTITGSDSEFVLDYDRGNLTNNKEKKHDPQRGKISFQVPEKFQEDVQLLVNCLKNGAVDDKFNAVWDKIGELTLEFDYNVRHSFLSTCLQLTLTFSDPESHCRSGDAKVIQYKGHHVIDLSNRDPKPGDVVFVSSKGKQLACTVDANQQIKVKLSGTAVRVKMLIPKASVLSALIHIFTTTTASFDGAKLKSLIERSSGAMGVGGAGKSTHIAELARKLKNEKRKTLICTNTNKGMRSLNEKLDKDLLAYTFERASYLKIKANVVIIDEATLMSPWQLALIANGNEDDLYVFGDPAQIEFIDFSKSGGHRSESTLMDYCQKYGNIEQWWTSHRYGRDLVKALKLHPKLDKLETDAEHNTVVELYYHHKFDLDMIRPLITGMNLVLVHYRDQIKRVRNLTSNASIIEVTTPHGYQGGEVDNVLVIQCPEGSATTHLQPGHNISAATRARKKLRWLSINCFDAQTPLHERLGGLIGRNFKLDFGTVKQVKVTTDKGEDLEYNLEFEKVQERIGQAEMPEKYSAENFDFPLFQDLLGSFTNMARATDFEVTGNKVTLKATSIGMEATLTVDLDELTVDGPVPHSRKKNLLSLVAWCCTGGSHPRITRKLDHRGWYRCRIIAFVHKLYDTHNKKLNLKGKLNGYTVTTKATSCAACTDIYFEKDGRVTHVEEDYMRSDSRHVVGHEVEKICEVLESPETWDILRPELDDENLSQVIVTERFNTAFTEVFASGKPTGNVMWYNRYENDSIRNNLLRRFNVEIKTSKHDNMFWYHIRIRKGISWHVERPVDNKTREVIKTARKPSVQTLAHDTLLSMLGHYSKKRVVGLVSKMYTKFVGAADDRLPGMVESIEYHKQKKTKVFTAISGRVGKLMVTSLKNKKPMVLVCSSEYKAIKKWGVNHRFGSVNSDHALSSPDTASELLALVAVSTGLNDAQIDTCFTNCYAQYICGTTGNNILTKQDLNNTLTSSRVLKGFFDKALKNHLSRVPANTEIYQSLMQTLADPVGAKTQSSNVLVTTMSLFGEDSTWYGALINKYEKVFIILPMRFRMIEGKQYTGFEGSSRVYEVPEFIRKGLRSTPVNLGNKRYFVHICRVIDEVCILELDENNNHWASHWSTNSRYIWLDVPSIVLDPEEVLNNKKLITSVKKRYDVSIVANLRRRALRSGTTENDLIVQARTLVNTAQFSITNVFDKYDVPVHAAKDAVKLALHVHETENRMLSLVSGDGWADDLKTVGWKVISDMLSKFVPNHNVDTLLDKLSPTRKQAIIENIKPFFEKLAMLGPVLMRDRKIFSTKSSDPWFNTQLKYWKANRTAYNFEPRYQITSLTYCNCDSCSTDDNMLEAIHLYELEGKGCNPTVNPSPQYTLVSTNCPNRIYGTLVSTAFDAQPLNPANSGGACCPVKRARKTVHPDPEQPGNTIEHPTGEVVCYVDCTVELGAMHWSTYATIALSINCTFKLTEGETLRFASEENEFVEDGGRVVGTLLAKNLKEYEQLNDATLKTTEIGKKYPDVVAVNTETLTPIVNRKFSRGKLNVIIPCNHGKGLIKYLLNKWASDVSVKIHDESMIYTRTHPFDIAAFASRHDIVLASDMPKGDVSISVIYAGTNQSLGDPGDTRYRYHKNTDREYLESFKREDCGVLHYQWSDLLQLSKIVEELFGVRLPMQKGIAACGHVVYKVKDVDAALGGIACSTCGFEYQKYEFVYTYGLIDEIRGSGQYEVSEWKDMNQKSTYRAEGSVLINANKFDSDVIPNIEGMEYTFVRTKDGPVLLTKQVIDTWDPVNSIKILSTSHNRIIVEETCDNNSRWYEEGEEIQWSTFGDEFEELEYEIVDATITKLKDLETVKAEYYLYYCSNCRAGYLCGNNKKAGLCPLMHSLILLCGPTGKSRTGSVPYVKLFEEPSELTEQGQVYFDNLRSTMTNYLQDDNTTTSKVGAVITEVNGVDEEVPQSSTRPNSQPQDITNFGAMITSFTKDVYTAQTRANFEEDGTVHVLEPLNLSIQDEENKSRLPVPVNMSAVDEISMLMNLLEISFNEKLTAEKLELHMMTVSCLAMRILAKSAKVRLARQVDINRASDSLRQQMLRERTGMLKDTIERLRDEDNASVVTFWVNLIKQTLQQSWSARKMTIDSLYSKISNGNLLPRDLVEMELTKLYHSDYTVTKSYLCQAGDDEEVNKQEVAKVGGNKTFAKYAKMQKRADKIFAIQMLRSFTRSEVLREMAKSEEHEHDPVNQWQPSLMTIQEDDDDDYNSFEYSMTQKQLLDSTYTSVMVHFRQSEMPKLNNWIKKMLLLLTGRKVVITYLDNERKLQINSWRTEEEYRDNKSFLSNVRSRGIYTIVESNGSLLPDEPNSPMALEFVTTPEVAETLCAKTAEMAEEEKLKLDVNVEDVQIQYKPLPENSVMATDVYRSHLMHSTPIEAIEDNTDNTYKDKAVVEPTEEPAGLQPEQTIGSKMSDAENEKIRKIFEEHRALRGNNVQMMSLEAQSNKERLNKHKRLIIQAMEENGFNLSHVNKLSRCDPQTVIQAINWLTGEVQLGRISTEEAEGQLRSAIRTDGSFKFVVRQFQQLNEVAEIDQLFKDLNQLFNLESLEIVKSHDQPGAMMDHDVENWIIRKHNRILAEAFFKNRREWPHLGPDPSVRNWIDLVDIDSDTSRFPRHPTINKNRQMVEYKFIDEDSELSPIEAVTAKLFQLEVGSGIRANVRWNDEAAILQWEVGSGVWSPSKSEIQEVVNCGPVGGSVVNSWMKDPKGKGRYKQIESIKEESYDRTARCNEYDLLIHSGVCKLRGSMLKYLSDKGKMKVDNRGGKVATSSVVTTNAMRAAEAAENDRFSTLMEKLDDYCQPFEEAWASHIEPERVTATAVPTIICFCQICCRGNLKKSDHGAVPKEWEWHHQPARSEEDSNPARIRADEDQASHPSSQQEGNTPSASGERGSERSDNSFIKAWRMGPNPRSKTPSSSSNDGESEFEDAISEFTEESDYTVRQQEWKSLRPAVEPQEVGVTGESTDDSDQGPLEPTEETVGSVDMDTTVAKKPRPTTGVTEPVEGDQSVIEPTETKARPYKDVVEEQLNKQFPNKEKPTPKTEVHVPDGQPLADLITNSLNNVQAERAAYEHRPGAKFITNLDQILGYKRIPEAEQEIAIRHSDIDVWYTKGLTANAAYGMRFRWMRFHGCHTYGDLLDWFVNRPYKQWINAANAKWYSFIAESTEKFLTRNGVTYAKLCKRKILPVTMPGYHLNGTTIYLDCLSSEWGICLLAMSVVLETMQPWVFKRSPDGFETINPTIYDFSCCTNATLYRGQPDRLAALERRERLMATVVDEVGIDVQSPNSTDTNSFALGLAMSSDGRFIYGLAKNCWNPLRPAIWAAQHGVQELKWVSDLRVEVHVAPVGTKRYHSHFTSWLGLQDSLLNGKISPKWYSTVNAVAIRRYPQEVIAKYYNETNLQLIATRPTINWGHFNPCFRHQRTVGEQCELCDLEKANKTEPIGVPNTLNTVNRLWNPIDPCDSGEEAWYTRYMGYEKKDKKEGESKRATAETVDVNEISDPEMATIGFAKIKEQVMTDLTAIVTGESGLPEFVHSERPMFRPALRRIQRWETMPRAVEPHPALSIVEWLDISQAQLEAEETTSSLKFDPNGGAGMIIPEDLDVSASHAGGIQMCNTPNDSEIFDNRHNAALIISHESIVKASNPSVYKNRELPVWAEIDDPMLPTDHDVANSIKVKLATELIAHVQEVAPPMIEGAGSGQDVVDLVKRRPNQPIAGWQVVKLASTGTVNPSDRGVQELGDGEKLFCQLFPEVHGTTIKHPIMDLADEPLVRRPLFHNPLVPKRFAYGRDILCKSLLHWVDTAALEARGLNERTKKCLIGMLLRINKLQIKEGEILHWYGLHEGVATRKPGVGKGRHICFTTQPEKYQQLGFETVLIDAEPYRLGASLRLIAIALMHNFNVIHVPKGGRVTLHSLAVEHAVAKYLEPVEWDAEKRRFNNLRFYRAGFTMFSSYSPNMDGMVLLKPPSTILQSVIPNIVNHKVYGIDECNPGWFDLQACYVAEGTRNTYSNTSTLYDYLIQGVMYLEIRKLLEDLSFPVTFAISSTNDINKYVKLAWALDQHSVEVDTRTSDDVAPAPEVVAWMAKHVSIGNKTATVDSLSLLRDIEQVNPEQFTVMSVTKEGDTVKITNGDARWRTAANSAAVVMLAKKLGLTGILRSNCGGLTWRIYVLVADDLLLNVGDVKEASDLDALMDLSRTQVKDPANRSILINAMRQAGNRKVKAASKDPTRSHERDQRNMEDFDPVQPSLGQSPISGGLTHNGTKILYYPDSSVFTLSLGTEKIHVSMRLCNRLINEINDQLLYEKLDSVWLPKADFTADQCPIPVNIQWYADSYKNKMIPMGDIMATITQNHQASLLDKSGERKYNSYLTKVPIPTKNLSESDVTSRSGGFVRKVKGDNAYQVKTFDLGYTKGYPIREKFNVNVLRVIYSPRGADGCAPAVIRMFCLQVDRNANVDELMQFLPVDAWSSAENIVASLNLLNINHTIVRNNVAYSTINNNTNQFLNLEIIKNSDGSDHIQMVEFIAKGARQPIDFQRAAMTSEFKTAFKALSDELNSKEAYINDSNVKVDDPSPSLMNAAIRAKGNPHHYFVTNSEFAEVTSRLGEDLWVLSGSTPGSMYRLLTPDGPRFALSFKIGKMVMLRSGTPPAQHLKPWCKVVMAGKQPGPHRVIVPKQDAGFLSKKDKTYAVHMHPSIGNLPVKPEAAVIYVSNWSNRNHHMLRERDIMMSKTKEQIFIMHELKIEPISNEWDQVIRIGGPLRAEIIDGKINAMWCCWYGNAKKAIRLLNEGPLDDIYEIACLWDNNNFVTIGNDIIPKGSEWRSMFEKKTEIETTGQEIKQLLEQMGVEGADKVKIEGKYKLKLQELELVEYWLNPNYEMLTPGKLISCKHLCKLEWSSFGAGYMSYIQKETEQYQIDEHAADRFVNYDDIAQPKKQGQGDLDDKMQQANLDQVTAAIDSLSTLNNLSFNDESDVFTIVSGDAEQNALIYGCSTTTDPINGEITRTSVDPRTMNYWDDETAMVDGTIELPYKNIKLQVFEDFKGVTQEKKSKLADYPSHSQPAYTKRYMAGTQAVSDLFGKTLELRQVAHDPVADAKLFAQTYFKAGSLNALQEVGLDPSAIKEWLLERPDSVKIAADVLDLLSGGLDVLGLDKVNVHMKLESRMKDQVIHLNDLLTMAGDNRMPETIEEQRVRLIVWQRKGIAAIFSPFFKKLKDNLKRCLIDKVVYVDGMTPQQISYLLNKVSGDVMFAEDDLAKQDRQTDHTLLDTEMEVYKLLGGNTSIIKLWRNVHNHWRAKGVGVKFTGDASRHTGQATTALGNAIVNLMVKRRVVAEQGNRLKLMMVLGDDNIILTEGPITASEITLNSARHFNMKSEASVNNHNGGFLRMLIYKNNVNSLECGPDIIRLRRRFEVLNGVHESTDENVTMRAMSYCMMLGNLKPVQELIRKHNWPIKPSRWYDYQALSNGLAMKYNCTSEEVDVELSRLIDMMDRREVTEVSKLMFTGKSF

SEQ ID NO: 1377 - protein, 5300 aa, Rhizoctonia solani endornavirus 5
MKTERRVQQLNSYLNIDQTRSARGQLSLCGTVSRQIEHRKTQDDLILEELQLFFHDEVDYEEVVYEPLERRVPITLGAHDHCWQSVPLTWRKSAKSPLDYTKESIEADRASAIKWQKRREEQARLKPGYVDPVGDMSDIEVKGMLKAMAKMIRVDFVRSESTFEWKDEPLWNLQVDRRPLHIVHECESDFDPDEALTYQELHDALEAELLADEEEFEIEEEEIAANDEMLTQLREERLSELRVGTKEINSFLEDNGMSGSAALQAGTDEWKTAMDHDMLAVRGILSRMRTKIHKGSAGLTDSEIKLLERDQSQYDIVAKKGLPNEHALFATSRKLAMELMIKLAGKRPVLDIGGDPTMHKYAKERTHIMRPILDAQDVARQLTKPNFENELVTICNHSVGACTCDIKGHFPVLVDSIYDIEPTALFSFMHHNDIDSFAYCHSFRQVDFSKAHGSLADGKAVFKKFGNELVTALPGESVSYVNNFQLTEAWVNCDVFLAHNTWRVYNVMNCGTHVIRLAVRTPYDIKFYSNALVTKRSETIKIKVPVLDNHVVSKLKWVEKELDSQLLRTLLDRNMNASLTLNTLLEFSHSVALTKVSLHDRSYSLLRLDHEQCLYSSWVVYLYAKRRIGWLNEIVHGQEDKDSMNFLLSSLINVGLPALQDLLIPQLPDLGVGDILKTLKQLIDRSILSTDNPEFKVLWDNLDDLRGSTTVKPLDIRLTQTSASVKCSCDLRTETDGDYICSCCSRNTNDYKCEDCKDAPRPLEEGEVDVVKMEVLEAIKLSILAELKSTDYTGPEKTDTERVPKKQIIKTRETKGPTDVQPEQIEVEKRGVDKMLRDYLREKKTYSSALTHHTPAPKKHDTSRTKVLSDNSHYHQCPNCGSYYHEEMKACDSMLRPSVAACPKCNSLSTNGLLTEEEFENPPLVGSTLQAQEIKLSHNEELPEDLMNYAELIGHDYLQAVVQGDKFFERLLEIETRPNNTKVWFAPSGVWRFQNNKQFKVRKVNKVVNSDQLCGYYALRTVYEKTSLSALTATSRKDGNWSSLDLITYAAKEGFNLIVHTDKEVYVHTVDSGTHGTILHSETGEGHWNNGELIQLEHLPCVPVFSQSATLAEASSMCPDFDWGLNPADRLKALTPMIVTLCGDALSARDMTDRLKLENIGGQWWLSNNRRQKHDLRKGFFHLEVSEERHEIYSLLNEVTKAQLKQPLLETIDIAHDDYFNKSKILSIAARLGVWRYISSLANADKGWVNGKAESSLSATRIHIKSHKLKTLDVILVRTKSGTVERVILRATREYVVVRPLPTVGQVSLYIPKSSIGSVLRRFVAIEQCKFSGDMRSFLENNCTAYYGVFGCGKSTEMAEASTKEDVSSLAFTTGALNSLRNKNTKGQILSVEAAMSASLRPVIQIDEATGMTPLDIWLLVSDDTKAVHFYGDVGQIGLRDLDWKLQGNRTLLQAMALCKQRTTNYKTKRVGGKLGKLLQNINPKLELAEHETDYKAYSMSEMDVEQIDRIIEEENITTLFFFYEAAKNHWLKYTQLNINSITVYKVHADQGAEGKNVMVIQNPGSYSDGAIHLDPQFLWTASTRAREKLVWVSVALYTKDTSLLSILRSDANFNIPTGGAYQEFAIIDEITEKVEKHSTLNDGPEEIVDVLMKLLSHAISTSFYQEAGCSYTYTNHVLSVIVTFEDEPAYLVKLKPLEWLDMGKRVEGLEIMKFNKPVMDILNIGKVSKEDYHAVCASIEPILSGTQKLLKELDELTNLAMPLTEFLDTIGYVSEETKHLKTKMHEALDDLGYTKLFVNYDLGTICGLDKERDLHHIKWEPTELSINDVTATFTRKYGSLDQFQTNYLTKGFEVYGDADVDDLQLLSWGKCEITLPGITYYNLLTPPEKSLQPTLYHMCRSETTTEWVMLRLTPAKFDFETININSVIMNRHRQMFNLRQSELLTKLAFALQDFTGNQIPTSIVDGDCLWDGLPSDPARIIKNTLRSKGLKFNMIHEKETRLEAYFGVGFMSMKALTVWFDEDNMPVNFELHAGAKALSGAFNINGTEWLSDLLQQFKVDSVLRTITEHSTVIVDRSVEVREPIPVPDLIITDAANNMIGRLGPSSGNIPAVLGDKHGWFTPVESLDELEALDTNDHNEPAKPVLPQRTSRFVWPPPPTTPSKASVNYQTARPLEDYDTSLQDVVMGEALTQPKVVLYPVELEESMDEQSRLETQEGRLQKRAQALIEALEEVVTGQVPTEPRVILNPVDTEGPTLVPEHDQTVYSHRAFIEQVLEFIKWLRDTGLYTEETQTTEAAQQQQRTARPAPTAREYLDAHSRTVTLLSQTPILNATFRIVVRRLRQLGRSVAEMVNVGITHTQTQGASESFLASASFVMITELITNHILTSWQEAATNAPTVYYFDAKGKVKRTTGRADPEPAPDHIELLQQMHERQLVLVHPQMFFVLESKGKNNWISKLLKTNPWVGKNYKIEKVEGDRTIIQFAPDWKTKTLIRSVAMMAQMTQVCGILGLTVKYKDSTFHLTTNQGCNMFANLEVETDSGPVVTLSSMYGKIICRKATIYHEHEDLVNACEMLGIQIPFKHIHTHNPMTGQWYDNRPSHLMVHGIDLYNGLNNWAVLSDRLNALYTSWGLILYAAMVRDNRLATMLAERNDRFTTMTFARERNRERFRKIEDFATVYNLAVSAGDKYAFGFQDLSNSWFFYRSLDEATNHRDVNTKLGTALIHDHIVYILDGSYIPVAPYSDWHLVVLDLDAFVKKTYDLEIERIGALTPKIVTDLFKWAYSGRGNPFDNLIIPFDKHRTNQTTVFKHIQKYANKLNIATVKARSKVLYVTQNTTKYLMRDKYILEAANLQEQVDSTMGGDALDAIDSMLFHLADTVFRSQYTIVSSSMGAIAVTSKLNYPIIHGLSNHSIDRWGKTSRVAIPYLTSLCVTLSESSNENARIVGQWLDTELKKSYPAWQMNTNVMSTFNVISASQCGVSIPTLIDRMPNNSMCIIAFPKLGDHLTHSTMRQGSEVVVNYNDVDLQISVHPDNIKMMNELQLEGTQLKIVSDMMGHYFIEVVKTDKPTRLNKYLSDPEVHSARLVHYTLPKLDTTMVKWLEGKPMSLCDVYVPENVDNLLCLRAQRPGCTWEDQKQYARTLRQTTIYNTRRTANLYKSTSDEMLIWAAVTYLHVQHTVNPIYNISQTKFADEHRKMGLSSILYHRLKDIMGAVTMEVTSRLGLNKSWLDLAMQLNDLIEDVSGNNKIGDILLLAKKYQVRRVVHLRDITRSEDQTSWYTNGFKGQLRAPKTNRPSKLPEETNQTLLPNVAIKQTVFSEVVVISGSGVFKQTLVDIANSLELPTVECDSHFSSSRRIRAQDVAVLLKNISDRKRTLAAYDVICCADSDWATIAAAILTKKKLHVLYTMEPSLIAKRMLDDITYYTSPFEDEHINGNTERILNSLRNWIPSLDFETWPIKKTMFIESSLAHLINDETVTENMRTYESSITTGAGHGSTLTHDNAMTYSESIKLDLWDLESWISGLENSSCHITSNLISLGICLKNGIPCYVSGPIHQLPSCFTLPDTDSKRYEQRHLSSMRQLNDRPSKTHIETVIEATLSRVDRLHSGVQISSATMPNLMPIRMSIPEREDDTHSLGYDKTAGRLMSVTAAIVCLTEGPVLFNNSWLDVDEIISLVEAQRFNALVTLVVNESGHVLVMYKRQGSMSWTIKEVVEQLNSSAEADEFSWLTKFKPGMYTTTHLPVLDLRYSGEVRFKDPLEHLYSNNNQEGQTPQRVRTITNVMSTANILGSVGGPGSAVTKETTALTTALESPEVLFNTKAHDGSESEETVESERTAHDTTEPPESAPVAQEQPPVVSQQVPLTEQTTDEAENLLLEQLFDNLENEVGALVATFSSFDLADMESMKFDNGEIIKHTNHYSPSDGMCWKKAVSFLGIELPGNEDGMSPENLMSLLTRAEKTFAVKEGNVLHIFHDSTIPLTSQEYKCISLELADVAGLHWQVGVSVFRVVDADQRIGSGKVIIDVNCSKAGKGYELKGRTEGPCVDHTHAPLLDNLTSLLNNQFVKTSLFSKSHMEFNSLMTKHSTLKFRFETQTNPVMFMNMEARYDGLVSNTTGFKNLRGVLVVTHNGVFKGVALNQDSKQVIFIAHDVKSGAQMGINNSSRSNTRMIIDVRAPIGTYAKRSKINITAEVMGVADLTLPLNKQTAIFLKMPAGSRIKQIGDKANLIVAHYDNYQHHKLEGRRDEREIIEDTLERGYSVECQPAWMWPLIVKQATEYVRPQIKSGRPIITFSCKHILANTYARARNLDWDESDSLINSVSISREIVEDSVEQISHQVDVSRLLMHLSDGAEVLPVTNHYYGEEVVGHPERPYRGTYTISEPTEFTNPADVINGDHVLMSDLEPYLEVLNVKYSTEFELTKLGLYANCSESTMEYILSSSIGYQTDESSEYDIFIPIFDEYDDKGVYSFLLQVSASWFFSTHKYGEVMTGRDLEMYLCHHDSYFNRRTRYGQDKILRQAELYSIHSTLNIRVPDALEFYQPGEDFEFSNGSMGYYVKRYGEQGGRAEGENVVELQEEDRDMWFLDRGNADLSIRQVGHLAPRAIVALASGGGKTTLVKLFPLLFHDPDASVILQLIAEPEEMTMDDWRLRNEQVRRQLYADRANIAGKVLMVWHPENVPEMWSHVKMVIITIDDKSGLRMFDLNNQSLLDYCKQYPRTEHWHIQRSEVPDKLIDRFYPEYKSRDASIQAINVFNALCLEDVTYQSNVISDKPLTKLFLPYVAATATSVEVAEGVLGEPEQANIQSMDFFTTTDKTDWLEVRLPQTDMRIKSKEVFGSYGVEKKTILTKYPVWSRPVFTKVQFAVLNSITTRFGQVQVLRKRQIDCLHHIEKMKRAYFVPTCEQLISKFKKRPLKIDAKETQKWLAKRPDRNKVTNDLLEILEEGVGVHRVNAIKIHAKLESLLKEDPITMPEEQKVRLIAWQRYGLAAIYSPVFLEAKKRLKQLLKDTVIYADGYTANELSARLRQVSGTTRFFESDLAKQDRQTDNEMLDLEFHVYDMLGVSNEVLSSWRAVHRNWRWKSDLHSGYRDAMRLTGQATTALGNLIVNMAVHTDIVLENMSKIFLILMLGDDNMFLTSAFLDLIGFKRDTEELFNMEVTPDSHTTHGTFIQLIAYKTPEGTCEMAPDWVRLARRYEVTNGASESTPDNLHARAMSYCMMLGAIPEVNALVARKNWPIKPFQWYEPGQAKIAMAAKHNTTTAEIEIRLKHLINMMELDAGHEVAWEIPLPLTSKLAARQDKKIN

SEQ ID NO: 1378 - protein, 5077 aa, Rhizoctonia solani endornavirus 6
MTSTIIMGERNKCSGAAACPLLDKQTAHLRNSETKSGCFKPFTASVTINGTTELSVVSNGGITHSQFSLFTSMEQESFAFDFETDMGLVKLFSDVNWTDMGVIFIGTKMIFDWGLIMYRYQDNKQLTKKELLVRLTSDAGGKSLREATLLHMQNSLELLNASTQATKCVELPTVSKPCVAQTDSYVNNHVSVSTGKVYGLINSLPMKFRMKKKMSKRYFLYKYRAMQQVKPTPKTDDVEVEDQIGVSATTDTNVTIIDPITTVNYEILWRQPVINEHLVGTKDNCLVKHNNIIKITVEADPDDIVVGGMGDCWTRIPVFKLVIPDAEEEGAWTGTVEEHVALREMHKKKKSLPSEYAMDIDVRDYPGMEEMEDEDFEDDSDFDDEWDDSDDDESEVHFEEGDMVRFQTDDMFFDYPANEPMNAYTLIEILEWMYEEEDRHSSLYLKTPNWRFIVWNGMIHLENNMFSSSYKYTINENHPQKFTSLQGALEQLKDLVAENETTTISLKVGAPNIRGMLSRTDNEVIDALGDMYSNKYVDIVDNHDLRVVRRFYAAHQKSILLTVQPSKTVKDHFSGLTNITILTRNDLTIDADFTFCRELAMFVAYTMVDPMDFSSDDTVTKFLQTQPEAKLPSVDAKTHICTELTSNMLDSHDIVYVIAPTLLGTSYGELKLEVGNYITHGNLVEYFPKNSTLTHTITGINPILQGGRVANVNGLKVYCLATHMVGPFCIYALTTIEHINIYPEQNKTRKFEVPIFDSWLFSEVGVDNLKFEMTEVNQELLNRLLNRNITNTVSDEKMVEYIMALSWYSYNKRGVEIANVKVTPEMAKTHLYLAKGLLMREELSEQLTQAALTKGSISRIAIATLSAMLRVKSFTLGETTTNIIQWVESLFNTTQVLDSANKAVQFWDTLDIWRSSSTELVHGNPSITGCSHHASCELTETGHACLHCGFETADKQTLYCECCYDTEHDCKHDCDVVHVGRNVCKCCKKNTENEPSVTTKTVYCDCCLLKHTETVSEEQSKRESDEPKTRPSKPVRHEESGPGEHKESMAKPAVQPGISKPYKKGHTHTCEKCRASFACECSNALENDVRQRPKDSCPMCEGNKTNKLLYSTILQTGETVFQPLTTQQYLTRLTPNAVVTLTNPELALETHNVDFTTRRTSGIPFLTKDMYSNSEFEFTNIKTAGPADCGFEAVQHYLTTMVTETHIFNSIKKIENFTADDIKKLFRENRMNLLLVTSTTEVVRCKQNDEFAVIMHAMANGENINHWYVADAKHASKVVPYGSIHNTRSEHEKQAKRIFSKSYSELTREQQLNLSYHLASATEIVFKGSLPFVKLVGDTMSNCDQPTRYGDIKVKVHNKLIDLVELMLQAKKTGKIDDRLSEPLITDSTTPIEEKLLGEARAALYDIAIMWTKPQQNCRVKIVSTTFYGGTNCMYLPGIKRGDMISYNYKGVITSNIVEPTREGMVAVDRQTANDVTVYLPKASLSSLLMKFATINKALVGDNHDKNANARFIHYSGPGGAGKTTAVVEKMVEAVNDDPETKIVATAMSREATDTLRTRLFAVIPQYNLTVETFERISSFDNLKCDYLIIDEATMIHDWQFHAMPVTAKNVILIGDTGQIGAEDFSLIPGRRPVISVMDRYEDIGERVESWEVKRYGNPLAEELSRHPALRKLQGNKDMKTAVNLYWNTNLVGSQILEAFAHCDVVIVFYNDHVDLIKKALSNSNIVVTTAAKYQSKEADHVGVLQSPIIRNQVPQDGDMHLNFQYTYSAATRARKSLSWLSVACHNTGVPLATRLGIRVGSFYNLLGKTTISDVKWDWNMQYETVEQEEVDLPPMLPDRQKVVEKLVGAITLVHNGIETVTMNAHDRICRALGLDISGKTLPNAATIARIKANSTQPPRIFFALDNSPWITPDPYTGARDWMDHIGVVYEYEYHGVYVKLFYNYNYYGYSCKIWTVENPTIVPEYCMIDSALDPLLLANRIRHYETTGKYMSNPPISTVSCWAIVTDVFELGGTTRSLTYCQRTKAIVPYTLRYIYPKNNETLERYSNNLKLNATKICNMYNTNAVSYSDISRQVVRACALACGFKEMSQSSEGTTYEVQAKHPKFAQVGVRVVNNVMQVNNPNAPICQMLALCVMNSNYVLKIMGNIHKPRMPVISNTNLQLERARALAALNDLTLPVDAVDDISRLDYQAFVTDFLEVGRERNSTLNIEMTKAGENYSFKMSATVGFITGSRTVVMKPDLTVFSTELGRTRTAQFRRSLHAYSYGPPGSFETGNIKMKLSKFATNRIRVLAYIVKVFHANNEEFQPRVGTYWLDIKTSYTGCAACTALYFTLDGHKTTVTADYDFRPRYVFGPHADIIKELLEEPGKCRLYPPEFEDKNFGLAILTERVYGWWKQMFTKLSYMQYMRDNKYNNIITINRIRETLGKNVANVEYDDMTNYPFWNQRCTQLSVIIDGKREIIDNPGLHTRQHFTKMDYILESLANLNKAQHGNKISRIISMVYVSNIGALERIAGMQESIAWHKANKTATANTLASKSTKQLVKALKYEEEVHPVPHKVYEYAKEKYGYQSLMSNNAETIADYAQQATDVVMCAGLVGRNSMKVAYYGNCPYITLLMPSVSMVEKYNQNYDILQTKLQIPTMLKMCETFLSHLPADDERYSFVSNLKTKYSVKISDADVAYCSPAILKGSNYEILDRLKELMANHSKVYIFLGRKVDENADNCYYRVDESNNILATGKWIEHCIHNGNNIMPGFKLHIANMLPTGNLLTISSNNWVDKPMIGKSFQIVKLPLLFTNPSKIINKSTLFDFVEYAVDVAFYNNMERRAINNATLKDLKVQARTMVNVGQFTTANVASKYKVNVATAAQTALFAYIAAQNLNRKYALTGMLDQERPVSSLFKLAGLKAITDMLGDSGDQLNYDNLLELMTNYLPINDVYNVIIQTVENLKALSINPKANYRCIKTTQGQVTVPKMKPTSDKYDCNNVVTYDQKCSTCVDRPELTDTIKSIGLEYMDDPRAVLVKSARCEHKGIAIVDSDNKDALTHKEQLFVAHPTLDLAGHAFAHITANKAGYYDENFEWAELRAQNIHLPYYESCVYNECRLDFTALDTLNVRVGTIIYNSSDCIITISLKAYQNNGEYIRFGNNNVVMVADPSGEEKIIRTGRRSNQSNIKVSLVTNVSQKISFFSMSDMCYIMEDAEEVVRGVAQQCHHTWNELQSVEFTKLSSGEYKSRYNNTFWKLLVGHNRWGVNINPLHGNMHLLSNTVKEPGALNIDELKFIHQLQHTLQVGLDNLLVDHSGRRIKSFQNKFVHIYALDKNIDRTVMHATDDTDVTLIICNDGYQAKKTPVHVNLIRVPADAVGRYNAAMRLIVGLLAKAAYTQFHEGQPHIVSYFYEMFAYKLAKKTKSGVSLSWARNFGCPIGHTVWRGMPTGENWYKIMRTSVAYGGKYGSDEIHYAIWPVDTWYVSPYSYLKSYSIGSIIDAGRNLTKVAIPDNLTAYGITYEEYSKFDNKYGMEAMPTMYRNFDKRWNSKQGGRLVDTTTPPLNYFRNTISAGSERFFCDSDITINCNDIDMDESSTVSIYFTDENGTSDSGSDGSSEPEDSNSETEYESVVESDNDGASDRIVSDKAPSLVDSDAEVETIVASDGYETMSEGKGRTSKGVVSNDNAIAKATEHKLLTGEGKYCGIDACPAELRKELNATIISQNTAQQVYEGWFDDEQLKRAFSTMGYDYASIKKNREDARPTTAAEVLRGNRPTVIYHNDAGVHWYDGYILTALTIKEQTANRIASKLELTVAEVTEQVKIQDDGTVETLQLPNGSEYTYEWNTTTKHVIDMTRQTLAYMETINPLSDEMSEYLSTLIGRKVSFVTPTKNNVNESNTFKDYMVHIVAEGSSPIRDQVKRNVGLEFAPLLLENQLHTVVQYETLTGDPKNPQRHPLNEIVQSEKYNPETDGQCTQMCIEYCYMFMSAEADESVLGGISYNMGDWATTDRTVKTAYLINMNCIIMDSGLKEAHIHIINEGPIAILGYKYYEGSKNGHCIVHSIVQDHADLNLGRFTTTRHGYTFAPQTLKFRLDEMTPGKMVDYLTETERDIKRGDIPELNDWHMRWTGRMDIVANKKKNAVATEYQKCGDLMCVNLRPEGGYVYRTGNSSSTAKNKGMELMVTCTGEDGKTYALSKHCTEYVLDVNMLPTFTPRRQQAVIKQENGLLNIESKQIALRNYNEYGALPVNREAKNLVILQYDGVSHHFRADREAILAAMTDDKRQIIIPVIKNAAAFEWIVQSGGPFVPIVMGRDASLGWGGVQDFIKSCLQICIDTISDVNTNYYNAAAVNKVIQWQLLGNRWGPTKKQMMVNEKGKLEERDLSQTKDKDYENELVTSVWKITQTLLNKYEVADKDNEDDKVTIRYKKMLQDWKYQMNVSVKVIKQSDDLQPARFSFDKRDKDLMRKTGILLDLTNSYIIDLHSNTVFRYTNIGRGTFEEAVKEVILENDVINTTNELYKGQFDKTFGKVLPVIAEKAYEFTDDQKQTAMTIDVLNDSYVTDWKVYPEIISNNHGGNDIYTGNGQFDCPINVEILEHDRSPKIINFYEDNTAMVDNSIELPNQDIGLRGGELMTGLTVAKKGLAVEYPTHAQPNYIQRAGAGVAAISKLYSNKVSLRQVQHDPKGDADDFISVYAQEGSITAIPQVNIDAAATLEWLKERPGTSKVVADFIEVIENGLDIVGMDKVNVHTKLESRLKDVMMEAIDEIGMPEIIDEQRIRLIVWQRKGITAVFAPFFQQLKENLKRCLKHNIVYADGLTPMQISELVKKLDINDARFVEDDLEKQDRQTDMTLIKTEMEVYKRLGGNPGVIDMWETVHHNWRAKGLGYKFDGDACRHTGQATTALGNAIVNLLVKKRIVREMGNNLLLMLVLGDDNLIITKYPLTAQQVSQQSARHFNMASKAEVSMVQGTFLRMICYKDEKLGNFGLGPDIVRLRRKYEVLNGVSEINDQNIIMRAISYCCMIGLTPETHAFTQKSGFNVKLHSWYSWSALRHATATKYKTTEAMIDNEYSLLMKTLVENKIFINEQLMFTSKMS

SEQ ID NO: 1379 - protein, 4757 aa, Rhizoctonia solani endornavirus 7
MNHPTNVSNTHTQLPSGELPVRRSSRTGVKTKTIPSHFRSASAGYEAGGRYITKVTKHFRHNSDSAATLMESYKQINQARKNRGQFMMQASVTPSIVKVEESNLPSIDLNKVKIGGEGDCWKKLLVNYSPSEPQDCIDLFNAIIGDADAPIGESSPWGTYDPLTLEEIVNEYIKTTGQIRTLRSWTAEYINIWIVISDITSTTAHLDSVFTSAERPVDEPGKIKLNMAELTLHYHPNLKFKQIDGEPATKVAKVHKAITKFSNEFVAKEAELKRLKIGVTTEYLMRSKFFDKLEFNTDDANSKEYIQAVTDHDSRCINNAWARNKFNFVITTKPDKVVDTSAVRDVDSMLTVTNAAILGDANQRFLFDVALSYGYLNLEPKFTTIDREAMEMLNKQPFFEITEAIENHTLLTTNPDFDDVIKHNITVAVVPLLSKEPEGPLSSGLGYYKTDSNCSYVSWGTTTNVEVYGWITGLMQGDRSLSRNGHVVHVVSRKIFDAVQVMVLSPLTTNKTQIGEITTRKFEVPMLIPTSLWSLGIPIFKTVTCNLNLDLLNRLINKDLTGKVSPELLLEYGMALSWYSYNKRGVEISDHKIDPFDVKLHVYITKVLVRRESFLQNLESMAFEPGFNSVLISTAAAAIEHLTGKFSEDIEQKRSIIDSVINRLKVPNITNSFGEVLDNWASIDAWTMRNTVEVMEVVAPPKCHHHKYCPQPITGTECLHCFEPTALDNGYCKCCFNFTDCLHECISEHSTGELICGCCHKRIEEVCPCCRSKHIKNVEDTEPDRRTRNKTRARLERKRVESGHKEKPETQVPKPSYSAVTQTDTQTKSKTQSTNVDDVVQFSNAELVTMLAENAVLITRDEMSLEDVEVDPSSKLSIIPFVIQKHPVEKLSNFELIELVEPMGSLDCGINAVRHYVGLDYSSTLTRRVTNKDSNWSTHILCQVLNAYGLNAAIIEPSGVTFQRVDDTEEFACIIYETSFEVESNEQYLPDYQHWKVGKIKRKSMYRIEEWAYPQATMQEYASTSLKMYNKTYPELNEEQKLAVCMSLASHNVFKPTAAINQPKMENGRLFNSSVHNIENGLFNVSVPDQYQAIVSTTFDNLLSPDVPEELNKVWDDYENVLNIKENVESAIYNCLFTIKKTIADPIKYCRSKKLNVKKAGLDSYVDLEGSQIKNGDMLIINNKGVFEPIFVTVRNGRIKIEIEGKQIRIVTIYVPKQSFISTIMRLTSLFKANFDDTALEVLLSTSKVLYGYGGCGKTTEVGKWRKNNQEVNVAFIAWTTGGQASLREKLPFENVYSFEKYAREGGLHEMLIIDEASLVHAWELCLIAGPTVKSLWILGDLNQIAAVDMNISGGARLPQNLLARAIDKSSEIEYRPWTYRLGKDLVNELKKNPGMADIESRSKSNTTFTTEWFEDFEASKIYEIFKDCDVILCFYNEHVSRVSKVMLHSGIKKVTTVTKFQGLEKPNVGVLQMGLRNDADIHLDYNFGVSAATRASSHLVWVSVRCHTDKTPLSDRLGTKYSGLLLSQIDMRNPVGFLAFADENEPIKVIVDEIPELTWDELVTNVAKSVQPKHDVSIDDFSINKFSQLLKHFASFVKVELVSKTSDKLVLNFKAFGRKEKLTVNSNFDLTGAIPKQFTTQFEAMVKWSCNAKFSQDNPVFLSKKACHRLRILEFIIKVYKANNKEYKVECLPGHTFIVDDNSCAACGPLTILNKKKHEVFNVTKDYFTENARLCTGHLKEEIVEMFESDSCPLIPDEFDHEKLSVAILAERVATWQKDVPHVLKSGGKWMYWDETFNKLLAIEVKREIDLDIKITGPDPMRWYPFKKKTGLLSRSTSISYIKNDKRIVTKFNKPMSLMPFILESLLNMYETYVKEKTLSPIAVSLFNKYGALNDFGMVESIEWHKNRKTAAYYNLTSRMGKLKIKSLAYERTVLSLPKELFNACAHIDPTLNITSNTFGYLGEPYEAASDIILVRYLSNTHNIDDYQIRLNCIMSTYMNDIVQPVYPMIGVDPKSAEIVVQRSSFANILNNHMKHLADDHPLFKPIKQQLDEDNVFISDKVDKSKENLCTGPSIVSDVKILCKLATTYRKIIFWLPSNCFKVKDTSYLYIKDKSQHAYKVDPAVLEGIKNGFTVGDSATRFRIHLLKTLNHIGIFEISNGNGNLWATPHEKTSGFIKLTLPKLVIDPSKIIDSGQLIQEDVSTFDIDVLNNLRRRMLRPGTTEDDLKVQARTLLNTAQFSTNSIFQKYNMTVAAMMKHMKVAYAISKFEDIMLGFLKGNSWTDDLETAGISIIADFMRIIVPDLPFKNLISSIPAEYQNVLFKTMLAITNQLDKIRPITIGQTKSFVTELNYNRLGLTGSLIKLFRNSNYVKITAPTHLYRIHGCKECESAVKYLERCGLRVPIVNSQVTRDLVLKTSKCTHTSQFEYTFNTKLMGLHTPVHPEFEDGQLIPILDPKTLTTDKDINVPELNAPIEWALILNSSVTVTIGKRLPVVYVPMKNNNVVIYNNKPIHKSFPIPKNPIETMIEYNRRILNLTNESAIHLPGQNVTDQRLRSVLPSEMIDLNVYSKLEYTRNVFGTDFDNLGMIVGSDLRIAPCYWAELHLKKNAHFQWCGVDENGNYIPGQLYNINDLESPYLRPIYSDWIDKDDYSVVEPSTFGAPGDRVVAMKAGETYTRGVSDTEMIVRRVGLIRQGDVMETNNSYYYCSDCNTIYCYPTFVHTYLCENGHNTILVGHPKGLSDTLPPWVTFRKYPKDLVELTESEDVIETLENVTNDYEHNAFTPRSFDSVLKSLQTKELLGWKEKLDLSDGNKTTLGSAVWTLLTKKERNHICDIPGYLSLDAYSWIAATHKRHWLQGSTNNYDYANDFLPIKTSALWLNGIRGQEWWLNNDGVLYISDPGGLDQFFTQMICLSQIYHNEWIIQNCPAGFTLCDVKWLDYSCCTKIQWVNENNKHVNEDIYTDLIDNLNDTKYQEGIASMTMLSPGSWALEIARSEDGLMSYGLACNSWNFSRPYIGNVNHGNKFNDSPLEIDTVIPLPTATRFPEHFSSWQGTYDNNTRLCTNLYTKNDVRGSLILPAHSEGLPPKGVLKEELDANDANQHGVGWLTGYKNKCLHPNNNLKRTRQYKVCGPKTCVADLIGANKLGLHSSIVKPEQFNKVTDMVIPKTSTVDVVAILSVRDVSTLVNDRQWYHRYMGLPIDYQSTSSQKNESDEEYNSDVESDEESDSGSDDEEDRESYHTVDEENEPSENQSGNDQIEEKDGDQYSDSDNETIKADRDDETLDDYNPDELKSLDETIDGSYSENARHFVECIGTEEHKDDVDLPDWYIEQNFTLSDTEYEIFINPVMPKRLAKGRDLLSANTHGTSKVFSKGVKVSGLVYKALKKLYNIILRLKIKHSDIVHIYAMHEGIAERSLSINKGRHICFTTNEAKYKSRGFETIKLLKEPGRLGACLRPIFGMLCPEAKAIVTHGGRVNTHGIWIERCMEWVLDNKECKSNFAVSAWSTMTPYMDGFCFIPGCARSAKYINSNILYSTIYGIDEAEIKELNLSKTYINATTTAKYSNIGIHPILKAMDEQHQKEKLPEHLYKLNDLPMVFVNKSLVSASNVKLAWHHDGNVFTKETRGYTMEKDPEFEAWFENFIQGDKEVNLGLNLLQNKNVEYVAKVDGDVRVLMNPEVTESCVEHCVRRFLFTEISEADPDDIIGQGWFKSFMNLDEIKSSLFTIGLNYEIIEGDTVYGCLFNEGPKLQIRLSKNQYGRGHAVLCEFKIKNFEEWSTPKKSVYKEKRDEILAKEGAWIDLDAYLSGISDRYDGIYDFNDVKNAKARIRGRLDIMSRRKQRTIMCVGQQLSNCEALQIQGVGPGALLCFRSSNGLKFSVSEKLKDNSIIVRVRDVYSRFCIDTGARLKLKDAKPEVKKLILAEQREYAFMSYSDKAWAMNSMKTLASIPVDSKAKVVYLRNFDNRAHHNFDLREDFYNRDPNTIRVMGRVGFKLSISNESWALFREIGDVKLVIEDGYVMIAGNGCYTEDKDLKLMQFGMREQEKIEKFSEMDENSINIHQIIGTLGLMNPENKDGDGWRSECEGSQLNLWSRGFNMGYEYPEDKKFEVTLIPLKYQNKNFEHLVNLNSQYKLCNWKQGLGVLINLVGAGYMEYAMKNVKSVKVHENILDSHNTIDDLAANTIASKTDQTSLEVKQAVYSVTSLNNLVINDDSDRYTLMKTETGLTENRQATVLYGTGTMTDPINGEVYRVPVPADTMNYWDDETAMIGGTMKLPNTDIKLQNREEFDGVKQVEKAIMVQYPSHSQPAYTKRMTAGLQAVSDLFGGKIALRQVEHDPLQDADLFEHTYFKPGAKAALPSIGLNPEAILDWLKERPDKDKICEDLMDLLTSGLDIRGLDKVNVHMKLESRMKDVAMHMDRILNGQPLDSNNGMPETIDEQRIRLIVWQRKGIAAIFSPFFKEVKDALKKVLIDNVVYVDGMTPQQISARLNQVDGDVTFAEDDLKKQDRQTDSTLIDTEMEIYKKLGANPSIVNLWRNVHNHWRAKGVGLKFVGDASRHTGQATTALGNAIVNLMVKRRLVAELGNNLQLMMVLGDDNIILTKGAITEQQISLNSARHFNMQSEPYVGRICGGFLRMIIFKNNVGSLSAGPDVIRLRRRFEVTNGVSEATEENLISRSMSYCVMLGDLPPVRRIVEKEGWPVELSKWYDWHALSTCLASKYRCSQEQVETELANLIEMIEKREFRTNTKLMLTSKGN

SEQ ID NO: 1380 - protein, 4492 aa, Rhizopus microsporus endornavirus 1
MNDLNKVIRRITTTNNSQGEADSLARSINQQNENQAILSADARCWLRLSELFWHINSSYPEHLLGVLDSDIVRGNDPENWPRYTYTLPFSRVKYMNTVAQNGIEKGLEEVVQELSNPITSSTIRFKTNGLYSFGVQDFLFNGTQVKLVSLRLVWELILRDAPHWVIVPGLTIADGLYHLDPEKPTTSGVLRMSVYECMRKAAPVEFRVTMSSKGVLINGMTPTEHSQRSTTLTIGFLGISIEEIMSSLRMEKSSDFVNNTIGHDSLIVNNVLSRTRFDIINTPTPFEKPSEEELMSSVTYNYLNDVDDSNFKHVLLCLVYMAVKANIAESVIFSPSVEELIQNQDWMVADTLQGASTHYIMLAWDQLPTFAPDYIHIIGLNLSGGEYSTIDKSEIGHQFTVGEKIFISPYNSNECFEYTSPGRLAFTGSRYINHRNLTYGRLVDQNYKSGSLITFTRERHSIVTKEPQVEWAELQVPYINPSLLTTAGLPQITTKRVLLNKQLLNDMLARNLYGAMSYESLVEYGLSLSYIKYYKGSIPVNVKDIDTEMIRIHAYVAYVLQQRNELATKLTIEALTGSAGLRLSLATVSAMLKFALQQITVSNDDNWFTDKLSKLLRGIRVDNKVGKLSTHWADLDCFARTSENFGIIASGVSNCDHHYEGNLCDSDITGIICSCCKNLTGQPDYVDLCIHCKPSTTPRQVPEKPDMDHFVLADNLTEEHEEESMDWEVQEEQECHDQAVIEPQYDLGRTAEVPRHQDPATTDAEELNSEQREGSHGSASTSGELDSVTSGSVTEDQTTMETLKIAVDPLVLRSWLNGEELEDQVDKTNYYSIIPAIPMGESTATVSDGLKIIKTLQVPEEHCGTEVIKLFTGVGLDPEWCNLNLGCREPLTGSQILKALIHFKVNVGVIVNNTITFTKVVNSDEFAVVNYISREGILGHWEAVQVQRTKVAIPYIIPGLGLDDYDSLALQVHTCKFSQLSKEKQLQVLKLLSIKPNHSTYSKHVDLKRVGNKLTNGLTSGTPFLDVNIEIEAEYHSLVDDLMKKSDIVEPIMTKVTDPWDFKSNLIQALKISYRNLAAVYNFEWKPKRVISGTLTNNSSLATIFVTSNKIKTGDVVVVKGQKFFYKGPIIAARNRLVIPQNVSIRQSIQVAVQVSKISSTSEVKRIQACKRVLANPSLMEKAKVLLRNATGIRGIWGCGKSNSIANAIQESELVEQAVAVTRGAQAGLVARLGNKLVASIESYSYMPDASVEVLHIDEASLLQPWQISLLTTANLTRINLYGDKHQIAAGYYEHEFGVVVKSNALELAANLQTADFTYRTGNPLMRELNKALGTSYVTKAEHTTDFEIQQMNLRDEVKLKQWIEESDVIICFYNDHVQYINNLIRADAMLMSRLLAKRNILPVVVTVESCQGLEAESILVYQEPFGRGNVHINKTFTLAAATRGRKQLRWVSVGMGSSSKWDLRQCLGYDLLGQAPDRDSATILIGPNGAELDPREVSVAEGVDLEDLSTEEINELVSKLVFKYMGEEELINTCQFDDIHPAILETIIRENAKKFNARVKVTLSEESIRVDIRVYLVSKYFIINRDMQVSTDLSEDHKVQLQRTINNVFGDKVVKRLASKIDKPPIRVWSVLSSEISRNLVMISHLAKIHEFMATTFTLKYQSAELLVQTTGGCSVCCGLKITSVSTGSTLHITEDYNITGVRYYSIEGEDHILESFITPDGFNTIRILGKPINETTEWSNLLTAERIHKFLKSGIRKLINGGQLMHSEENSSKKKLLEVELANRATFVGKFDGYSHVENWPIALKGPDDRIFYKVGDTVIKSTTARSWFTSTGMDLSEADKRKMVELAMRSDLDDFQKYAGYAVVENARRRLLGADPLSAMIKPLSWHENQPSSKVADKLRDKVTKLYFQKKRLSNRVFYTPTPVHNLISDLYKLPNITAAITGATQCDANLAAAEIVVLDAVASSRNDVRFIGETLFSAYSANLNLKFSLPWWHSQLNAQHSASLRTTRAMILNHIRAIKRGETVENENEAQALIEELELFSAKRACKFYYPSKEIKESTVVLGPSIFDLIETDVVNLILSSKELLFWAPYYQHDNYLHLSRSKIVIRPPKWFKVEGGHTILDGNKATILIKKTFSDVALYKLVTGHVTYASVQTARHNKVQVPMPVFLLSPEEIIDNKSFIKHEKVTVDIDIISSLMKRMLRPGTTFEDLLVHARTLYHSDRYSSVTIHRSVLETAAEAKNAAIVAYLLHKTELKSLDLFTGQRDQSIIRQTFMDGLKSLLGELGTIVESNAHSVKVDLDRVVEEVTGNKMLAQLVDNFVEELDKLQLMTLRPKRRINHQVQNLTDLMINFVKWLRNPNLHKSHDTLQSQEVRGRKSTNRKAVVCFFGTRGDQAIAATVATAVDYEEVVLFTNEDIVEKASAQLHGTSVRVASNGLNTNDIFAMWRTSNPSHLESFAIQKVLEEAVDSDLFVNNFNTPILEAKLPRNPIVIEYTPMDVMHELGKPAIWAFRQICKVILHSKEIEPHPESEKVVKKLRVQYSSFGKWASAININPVSNGSILNNKFVVYHPLLEEHLIEELITSLGRTNVVVVRGCKYRESDVDSVDLINSKDCVVLHHGGLGTCAAIAASTNYSLCWPVMKEQIQNANYLEVLGVSSTVNTIHDAISEFRSWRYMGKTRLRLYSLVNSELALDKVMKSLKTADYLVQPEAYEDRISYWVEELSNRKGFCKVVEHKVTLSDVNEDLTIFGMDHKLNWAVGEASGDLYAVANEPKYNHQIVGLNMWLINYPSDKTPAIFRLQRQEKAVFVPTQKQIRYVVEGTYICISCNNPLSSDPMAQCKLCTRNDLQTAISLSGEEAMVCNQYSLIDYLCTCGTHTCTSANDKWYCTCGKLITDGNVYRAGVTNGDATMMFKYVSNTRLNISECDWRQTIRDLSKVKTLQSMVVIDGRKPTVNFSPFIPPPNTSEAFIKKFKELMVRVQTYNRDQPAPAEISQLKINSSHEFMQRLSTGRSWTSSELHFVDPKYLKSTKISDSQALFLARVAYELEQNISPGATVGVYALEPGSIERSLNQQDDYRVVFASRKIEHLDSENTIWIETNHSLGRINACVRLLPWLLGPEASYIICGGRYGVHGIALEEVMRNSEYKDCSGTPSRRGWFYMDAAKLTTKPTMGDRLKIISILLNYGSIYGVDEAVAFMFPKMHLYHSDRWDYSNTNSPYFKDSRLDRWATSCTTSRLPDTLIKGVEIPLQWIEEGFGDITGFNKFIKLLDENFIPRKENSPSNRLEPLMIEKFHIMKANRNVKATRCELTTQRTISICGVGNEELFNPAEDTFCHREVLYYCVNEQPDGSTVEKFLKLDFQPLESVESLVVKATWLNFGVIIKNKDKHTVEIFNPTSPTLVRLEVSEGTLKTAGHVKLMKADPESNLELVCENDRKSIDAILSESYPRTIVGKLYDQILKLEALERQSPITPEYIGPIANLPEGLWKVVNNQTRVLIYKKGSKLTSNSDLYGSVQVTKLVTELHTADGADHDIMVGIEVEDSKSTISNPNLNRISCDVQQDEAKSEGPQDTRRVTRGSSTPNTESTSDQNEVDTKLQTVLEKLNYDLDASYEPSDTTHRRDSETSMVTAASQENKVFAIGDNIVGSVEQNWYKTVSERSLSPEVLVREARQKPGVGKGKELWGKLKTGLLAVELAAYWCSIKFNRKEANLVTVEEQKRLSSDSGDDWEDYRRQIETPALFYEEVIEDTFLLKYRMQDHHFNKLRTLLNVRANHEIEVPEEEADIVARANTIINFYWDRKDEIYLPRELSSIPDVEGLVLSRKDLLTLSRIEGWNIEHLPNQDSYMFKPIKFRKGIRSNEFRSIVYLSVLRFEPVGFGALPEEPEEEMAYGAPESWENAKIGTDRGPDYHFFVEPPKGSWLQSEFKPSRYQLTCMDSLGLLGGKVQRLYKCQVDRSVVPLAVSQGPQSLILETSTQGSEWYDKPLQLVPQPKTVYIYEDEHGMLDVIVPLPNVDIGLRVRQQPVEIKEFTKYKLTNYPEQAVPAYTKRMLSSTIAVSKLFGSQAVHRKHWPRHETEGERLVKYCYGPGARDKILTNRRNELWYNLEDMLQWLKQRPDRNKITTELITVIEEGMLVHPLNILNIHNKIEARLKDVLLDEESLAISDTNDIPKTKIRQIVWQKKGLTAIFAPVFTRAKQRFKDLLAGGKVLYVDGYTPWQINKRLHQIKVVQDTWFYEDDLEAQDKQTDKHSLDFEMWWYVNHLGVSPVLVDLWREAHNHWIGKNQEVQILEDGMRQTGQATTALGNALTNLVSKSRTVERYFNTIDLMMILGDDNLIILREEPDLSKSVEDAAIYYNMVNKPVKSKTGGGFLRMQAHISKEGYVALGPDIVRLRRRFELTNNNSASDVKNLENRAENYKYMVGDLFGKFGSKYPLWYDYQELRKSLAAKYNTTEAEIDNNAGLLVDMILENKAQPFTKTMFANIEHRTFKT

SEQ ID NO: 1381 - protein, 3855 aa, Rhizopus microsporus endornavirus 2
MVRKQTRVRHTTLDFTKGAFERRFPELSNFNKVSTPRFTSLSRQVKRAYKARFGQEVPIVYSIDRGMNIVVDGDTMSVPQAVMVLQGRAYRSTDDAPTKTNAQNSTAFSTRRRFTPLRRIPHALVKAAQRLVTAYRNPYDTLNRYCAPYRNLKMMASMPGMLSTAYYGHKVNIDYKVKVHRCARCNMLNACHKDMVQNKMASMMGLSADEYDDPYNQTFVDYNLLDCGFCGAPLTLTPIRPDFNLKPTFEDWNTPNHVGALTEQLGVLGYLDGTYDVDSEYYHKAMANDLRVAKLAMSRFNFKLVQVPANLTQQELDALRQEFPDVMLQQQPGIATSRDFDDAVLECAKANLGQSFGHTQADIVIEAHLVSVISVLRNCVPGDVICVHSRFGKVHGQRTDRAQLFELYNSTELLYEDCNYTLSLSADDRDVLESDVVYDVGKTYHVVRTHKLLNNEIIFIKCVPGGHVSKVASTVTMRASDSVEIELPRIKPQGVVNFTGLLAMTTERVKLNTRLLRQLQARNISGDQTFQSLVDYARAIAHSRVSFKSKTITNYDITHTDVINHAMVAYVLGARARLALPSAKGRSTLQNRVTDIILNELMQTVFEAATTAFQVHGKGAISHLFDLLDESDMLKLQSYLTHPAWDVFDHKSGEVRFGRAKELNISGVKVTAEDSCGHRHDSCEHNTGSRTCICCGRLCDDNLCCCCSEARDCAHEHHSCTHEGPNRCICCLKPSTGNFCDCCDPGPVGQDPVTQDGPDHEPDYTSADRGKDRADNRTSPEGQVDQQTTTEPSEYDLNCQTIAEKATPSYLSVVCDGPCPYIEAMAESGLLKADTKHHTILPFVPCGRWNAAQGAFKVENYSDPANSDTNCALHCFMRLKTNTSLQELRQLVGEGPHGVEHLVTLSQVYEKNLIIVTSSSITICKREPCSELFGVIMHKGYVGSDELHWVLANGQMTTFPDVSPVQAEYVPNSIITDLSSRMMHVNHYPMSLSEYLSVRKDLRVKFEAAVLSYIGETTTMTPLQVIRSNDSVALVNAQGEQYRFNYKAGTQSGSILAKLFNARDPDSDTDLYKYVDFGGDGTTITTNLPRDLLAANVYHINKLYYSCTRANGSVLRPWAPARLVRCGVGRYVVTNIHEPLKTGDVLTLRTARGTTTQIVTAKNGLAVVSLDPSNPPCLKASVRLTKQSMASLLRSTCMLSTMDSTINLKEADSRTKAILAVAGWGKTNHIVGQARRRAQEGHKVLLCASSTTAQQVLRERAGRSIQVRSVESMLYRPQRYDIIYLDEATMIDCVTWYHLARCCDELVMVGDPTQIGVIDTILLPGVRSKLGAVEHVTDKEYHWQTRRFGSSLCRVLKPFYPEIESVADHDTQVEFCDLKRWDPHAIRAIIKSKNPDVILCHQHAVRRSLSRITDKEVSTIHKFQGNERNKVLLVQYDWTHTNQGITVDENYMISAVTRCRSALTVLSIQMGQLQQDLYHRVGRGFLGYGIQDKLARAIHKIIRENQPKTRQTHQDTKPKRTAKIDSQQLHTICEYIVQRAKSKGVNADVEQAGDQARVVFKKMGFELGTLWFDTHGNYKSTGVVSKHLPEDPVAEALAFVTDEDQKPEKQEVKRRCCTPDDRPDLPSPELKHHNNIKITYSQSCRLMSLHHALMLLQQSGATLQIPVKGGAVTFKARAGCSVCCGLYITHNGSPQYYLVEQYKDFPNRRVYATDKVEPQVTELFVELMQLVTGKESTTALPRELVSIMNVKHMWEALVLDRAMLWLRQNCDKVKYALGLGDDPGHCQLYAQANEKRVAQLKARMESDGLQLIPGDHHKYPHMQLHNTLGLGASTTGTYMCRLHPDGYEKIDWNASSLSSKLTFLLNTLESEKLQLLKLSDSRKVGAIDGMTFSLEEHRSRNSPVHKWLREKTESVQLQMLKNRQDPMYLPSNLYSQFHESLRKCVPEGYINQISMPAIKAGFDACIDTAMIKYAKAKPAIVLTKYAWIPVVNSQWELDPYKMESWHSSASTEFAESQLAHVYELMQDKSIKDPASQAVMDKLRSQSYYQTLSDADLERDPRPVIATTAGLANLEQLYKRCAAGLPTVFLCPNLSTSGFRDVLTQNKRGGVVTVTAASGEHYAIPESLCDKLYQPGSPAVQVGTVAGLSIMTNARQPNYYATNPGDNSLGTVTITGPVYTKDLVTAKTEGIFRSRTVRIPVRVFRSLCLRCTVADTSFEDLLNYARTLANARYYSNRSAWEQVDMSISDLQFASSVIYFNTRGVMEQTERMVRLLNTWNTTNPWASQTLAHIKTSLMEPYSKVLSHFGLDLSLDEMLEKPELINRINKHLQQNATLNKHAMKIGQSRRMIVRANRETKAAQNTSDHKPRHKQRGTTDVRLNESDHVLLATFGSTGDMQPFIALGRELSRYVRSVTLAGHVSLKPLVEGAGLKFHTMRGDYNISMKDHIEFSGPGDQLHIKQGAQRFKTEVDELLRSLDETPTNITALISTPFSLGTETFAERRQLKLITLCSQHWGPSNRIAEAAMNRPESPSTAFMVLLYTQVQDVINKYRQFWGMKQCGPAELHKMRTKYVYSMLKPYALADSMTLNYLGWVDDNGYRQVERECHTTRGCRRALVSFGSMTGTIRLSAEQAVCDTLLANGWQVMIVNPIVHRIGVDTVTGYVNYTELAKRAEVFIHHGGAGTTQRCVVDQIPQVIIPFFGDQPSWGHATESRGLGATVQRKDIRDKLMSAIHTATSEAVRSNLAAIQDFNWRERVPTILLEPGTRPKMDDSSPPQDSDGPSTGDGSNEDAPPSTNQGMEGWRTVDRGASTGVKHGQLKSADASPSTRDNRFEVLSTGPDETNPAYERMVQSNKSATEKVNKISPGLYSVVNLRTIGTLYNPTGNDSCVLESLKYSRPTSFQSEISRKFAALGVARYVSWDEFEDVMMLLPLNIVFKQEHQSTGILIRKSGVTRTTFLEVSHQGNRLHCTAVAVNDQFEIVDDLEDADDIFDSPLQSDRVNSKLCREVSEQYTPQVDQAITNDELRYASVDLDCTKIKQGLLTRLDIQSLLLHNQYIVCETVLGPRVAAIQKLERGFWLINVNTSASGIIVIRTKDDLKPRGQTQAVDQTVGAGSGFVFKVQNNNEGWRQDREPAHQHHGNEVNTSSRINWDDQPHQPSSGFWQVKPQQQVVLIPRPAYIIKDERAITALCEMHPIFQDVESLLGLTERRKVTKCRESGDQDQVTKIYNIAIKRHAADDKILLCRDELQLLGTNRTARTVMLADDVVKRTRYRHIPDTLRSGPDVVCHRQELPYAVVDDCGWSVPLPERGSSKIHNIAAIKFMDLTHVPKAPKPDRFARVVPTFRPYINVATGDFCMVLSEAHIEPKLEALTFFQSNDLTDCLVIHTPETSVIKSTMQPGPLVVETKTALTKYPEQSRPVFTKFAGALENSVNTRLGAVKTIRKHANQTIHSQLNMFSEAYILSNAKEQLDAYQREPCSFNYQEIHKWLRERPDAVKIQNELELILDEGFMANPLNRVKVHLKLESLLKDKPVNQPQDTICRIIAWQAKGICAMYSPCFMEAKDRLKSLLRPEVVYADGLTPDTLSALMRTTDVNCHFFENDLSKQDRQTDEYMLDFEFAVYQMLGVDQDLLKSWRTVHQHWRYKGDTVSGTLNGMRLTGQATTALGNAIVNLAIHSRLVLMNMHTIKRMLILGDDMLIVSSKPLLIKDLTKYIADHYNMESKPYFSSTHGTFCSMICYKAEESLELGPDIVRLRKRFELPNGVHEVTGELLEARSLSYLQMIGWTPETARIAHRINPAVKLVRWYDFKSMVAACGAKYKMNAHEVLDNYKALLTMIEKPKIYQHKWVGIGNSKH

SEQ ID NO: 1382 - protein, 2185 aa, Sanya endornavirus 1
MECNEGILLINSNHLDGDQDDVLALLTNLRRTFTYNNNMFDIINSWLMDDSIWPNTGDGFLLTRISERTFNIVRSMLNDDGFCQSGTTYRAFNTELSNRLPPGAVVAIPTHQKMYAYAVNTENGVVYQPQNILSTTLCQDIKICSGIQGWYDEAPLSQANIALADNILNKKLIADMTEKKCIFLPATLCKRFDTYLQQNTISSHINKVSAPHNRDTIAEVVDAIFIEHIIAFTKTKTLTCVGVDAQIFCLNYKRGMRMASQFVTNGDKTILSNFVKNYKLSLESKMSGALSDEQLLSLKESISHFSDVKNFLTETVDGVCYYSLNSKINSVRNTNSFCCTVDNASKYLLERDGKYYTIGDSGVMVKVGHRVGCVLRLGEFQLTCGTNNANHPNLVNPLMSDVKKRHFVSNTGDNLHIHIPNNIFSKLVARCLLDHTTLKDALTYAKALCSTMLYTSDSVHFREEVNVMDIYKYTVLCMNVAWRNRQMVTCLRDASNLGCSTDDKTTSAFLSLVSSAMLEFTRDYNFLTPLLGKLKEFADSIIPESEQDKLLSLVRNNQFLEVCQPYHIIIMRSDDQHESITDNRQDSDDDEVAFHDAESGNDNQNHSATPNNDGNKWVQSTLTTAHSSHGGDSNAPSANESQTDARQASDESNKNRSGKETSVTAIDRTIDIMSQSEMVVTDSNVVNLILAHNTINENKTNNQVNTQENATTTRNMTQLVDNDECIDTQIDSDDVNFATVVPRASSITKCDFCFVHAGSKGDDYPMLSMQKLLVATGATVCALIPADLSDRIGGVKYYEYVDTYRKFTTTASAQRKQGLIKLLLNAVLPKKLFAAHCNKHKTVVAPFFSAEACAVTPIETYIRLVPQWICHNETWDGRTWGVHSATLEVINKIVSRRFSKVPTKVFYCNPSFICPAENNLGFPMHDAEFDYDANTRSFIDFSRRYEHKITVVSAGSMLPPDPISYFQTIFNTLSGPMCWVTGEMSYHSFEFTYANATFNCNKNFMSGNVFIINSIKYKLVLDILHEVHTHGGAGTLSTLLMSNAKIHVHPVAFDQQNNKHYLENVDVTRGDLTTEWKFFHERTVALLAPDSKINPTTLRVQSNKFEINTAQHQLSSDIILSAHNIKSIQLNPNNVDSDCVLTATLQCIDDAMWASNAATLYECYTMSDICDVLHYLISLGLPFQLAHRGVCYVSPGREKSSQISINVDDLLTHASSMSVELGDALKCVVLQEFDWYWFIRFSCITNVNTTMAELNKALTTNNAKEHRFFSVANRKKSNPILLLDATTVPGGFYTNDKLDHNKMYLCLTNVGCVYGLAFKDSISGSSRTLIYTGCTSKARCVAVACTNNIQLFLSAERPIQAIAYGKAALNHSTLKQLRKYGIHMQLADPEFTGDLIVFNTDHDINEDSHELRLLKNASTISMPRHTYDNKFLKQLTQTNNKLRRCIVSGKQMVVMHLKSEHEPTMRACRLIKGINLDTTQHKAFAEWSDKDTISFMHRTFCDKNGKMTGIYNQHSDKPAPTNLSTLLEYLGLVHNSWASDALTAWVQKYHTPAHSCILRNCEEVIDAVDADTMLCRSYIIKGRTIFIAKNFLCLTIPISGAGHNSVMKTKIHGGLLMSAEDYIMVERKQLSALTKRTSNESKQITYNATAMLPMGANTNTMTVDELSTEYNCILIGYTENLDYDCEVIRIDDLPDMLSMEYWAYDDVIPPIVHLPTNKNFTISSRVHPNRMTKSDYMVMEAAPTFARPSLTKTFTSSFNMMSTRYGGYKQLQRKPLDINMEYELFKANYYKQDYLNLLQHYKERIVTVQPSDVLAWIKKHNYPNAAILSLEQQINAGWELSGINLVTASGKVEQTTKLTILTRWFDDVTTRAIVAASYAISAIFSTFFLQMKDRFKSLLSRQYIYVDGMTPIEISDNIKSAGAFCYIVEDDLSKQDRQTSEDILSIEYKIYLDMGADPVTLQFYMTCHKKWRWKGVGLSGYWNAMRLTGQVTTALGNAIANLIVHNRFVARNKDKIAMILFLGDDIVMLCKQLVNVNRHGTETKTLYNMESKISINKHAGGFLSMIVYNINGNTGIGPYYRRLRHRYSVVNYTYKQEDARDKLEARTLSYCFMLGGVSTSRSIAHTINADVIIPNWYDVNTCIEANCTYDRSSETTVLNHLGQLVHMMHERNASYKTIKQWSYKQ

SEQ ID NO: 1383 - protein, 3928 aa, Sclerotinia sclerotiorum endornavirus 11
MNQNNNLTTATMTMAPGYQTINIASHPSSGVIGMACTTNETPKNNTTTTSNDNNAKLADANVSTHFATEEEVKAKLSSLAFSVENGKIILDSDSLISGDPSIETENHCWTAILKCIMKVGVNSTVYSAMHSLRYNQPIHISIINKMPALAIMFDTEHRRSLSDLRDLFKTLIGKDFNIDIFKCDRLYLKKIGPGKVHLEMVRVVPVGFPDNNHYITIYDLLTADLNTLRLPIDFDYLYKAAADKNDLVMTQIFDILRNGEQIFSAISENDSMGHTNKILEKLAHDLQVPVAAIETGEINAQLKETLARVATLAVKPRDTRVEQLPNDCSDEIVDQLIKDHGSFKFVRGVAGSHPHPYHNASRHAITRTIISRYPKSDVLYDIGGNFYYHAQNGDWHVHSVFKTEKHEDASRYQTYTKSLVKYATNKISNKNISGSLNSVSNSMLTQCLTKTNNLWCNNSWDGCPHGPNSSASFAMSIDTLFNIEPAELLAGYIDHKVLTATHALTIPAAWHSADSGSMKFGEGYWQKIGGQLIVTFPGESLVYTNPIRLIELYMNTPILMNDTHAIYCRVSGYTGPHLIIEHFVLPRTKVLSKIVQHSLWTNPDIDSISVVVPHIDIYAPVSLLRREPFTLEPMMLNIKFYEKLLNRLLLPHTWEALLQYAAGLVGRTYGSASGFTTQYNLTNSEVKRHCLVAYWSNNRGLESLKPLIKRSEELVHQPSFLQQMWSSLKTFLMELGREFDPTDNAIFNKFLTDNSQDNMHVSLLLDRAFKTIDTVSESTRLRLSHTITNGQAMELQVNSKLPAPDVDTWREEHTTLNHLTVNNLLKTIEEVNRSENIGCVISARCKHNHKMAHVHKHGDFNVQNIGECVCCGVISTVDFTSHCSLCAEHDLCLGKSISCKHAHTFKNDECCGYKNCNCKKTLKCSCCGMPSEQIRCKICGPETRTIIPQTAKKDNDDTNYNINSSGVSEDAEFWNDEDHEAKPTDTKEPSDQNQRNTGANTTQFPPFQPQRSASVPNLKILPTNSMMLANVEYYPSKAAHYTYYWPNKAEHGVSEHSKHHATVESLASDYNSEGYDSGNSDNDSYRAESVVTDANVTQDLSARAENKIMAKEMLSELRDLYVDDEAPIDALGFKPGERMSSLYTPLTFYPGAKDREPRSTYVPINLSQRQNVVTVWVESYGQAIGDGTCAADALAQVSSQDYKYICELLQLLTGNTEWWSDVELAIAAAALRINLCVATPAGSILYINDTNMSTYVSICTLVQETGDSHWVPCTALIDQVYARDVNQKYMNFLFLATYSTMRETGTVDVNEIQKAVNECHSIGLQAAINVSFHIDNDWMNILKTCPGGIFTQEGYQHTSQPFISHDINTYIHKENDLTIVSAPTGFGKTTKAAKFGKPHEKHLVISPNRVTVINAASYCTDILKITASARANSQWYPLDLPLKLINDCQVVYMTVDSLYAVISNGITNDWKQLLSGRKIWLDEIHDVTPNYMYVAKQLGSYVTGVMSATIHGKPVITETKHSVVTTFCSQEVLSNLYADYLEQGPTREQAWIVPNVAGTYELPTESIVKYNQSEGRFASVSSKTAPEVNWQVVNSVIATNCITTGATMPHIKHISDLGIRITSHFHYPPIIGMKKDVKTIKFYTYSRYNYSMSDLMQSRGRAGRTDTGTAIMALPSDEQQLPPHVSLLYALKNQLAVPTSAKPLCDSLIKLPFNEQAFDAEFNENKDKIDSKIQQWDSYLTWKEDLLEFKKLLQTTKVHYSDVTYTKEDMQTMLVQSLSNKPIVTLHGAKHDRAQHTIASTKIRLPKLAKCVCGATSLVHNPSCGLPYITNATELEWLDRAYSKYDGSMFSHDETIIAIDTSPSSANIDIRFKLAQQYFNIYSKMLNTILINAKNASQPSLPIGPKHGVIFTSAKKNNDYAVKNIQHPNKVQNNSVVGIFDRDNRTLTLARVNNGIINVRLSGVNAVIITPIFTANYALLLAYECLQKELTLSNTSQVANQSIIISGPAGSGKTRLLAGRYHTDPKSKILVTKQLDVQFDYNISPVSPNKLLQMRQDYETIYIDEGGLMTASDYILLASKCKKMVISGDLAQKVADDVDLETSVSLDNTWFTSQVHNKIELTETYRFGNATREFLAPIGFNYVCHNTKDKGIFMKQCNWFNKKTFNDNLLEFDIQLVITHSNAMASNIREFLGPNSPIKCMTTGRAQGSQASRTLYVAVNNPSVTYTIPEVYTALTRHKEHCVILCDSTAFNTLKSMGLYSHQAEQQSLRYGYKLDQLLDSSCTTISSVVNVNLMANNKITTVYNDVKATLTNLYKDMLMKIDEYILRPQANYSLMLLNVIMDFNGIISSDQAEKVCRNESDSVIYHEMYKIIAQDGVGSVCTIDTYTELCELLATVTKEGQLLLVVQNTIDSMGTPRLLTAVVDIHKKRVLIRDHYHAHMDQANAASLIEFINQGVSIGAWDEQMVLVGHENTSYLQEYLDKANKIFKRSKQFQVYNTMVRSCVKLLQSISDTKFVGVKSFKIIYNILQHNVLESNEDIEQLTGYEFFRDYIKTIATARATVTLLMGLLDRSNSYDNISSVLPTFYSDTVVEERYNVNSLTHMLKRQSQQRHGAIVIDQSLIINLINALMLDKLGLDVVAAGLIGATEFTITTVNDYLQASLPVHVIDYYLEQARDKIQDRQIALGTHDYSQEAGKWDGIAAANTIKDYVTSVSKINPYEDWSFFNVNIPEAKADNLSSRHGKMTTQLINELLKSAKKIGLNDTSLAILSALRSVLEMSGLNGTMQKLIYSIMNFFSQLGASAKRFFEFDSIIEDHQYKIEELQAENAILRRAMEEKEDDQPFYDARDYTIKLDHNGDDHSIDDVPVVSTGPFEHEKATLHSKAVDMQYAREDFKREPQDKARENSGLTKHIKMLMANGKMNYAENAFNVKGQSISTSLKYEDRHDYKSGMLKTWQHHEHYSTLKHIGIPEVWISQFGSNIYIAVDAVALKLEWQTSNSYKLCWHDESALANESMLSFVLKTLSTLGGAKGPQQNTLIKTIVTILKQLLQWCSLIKDEMVWNTKYYSGAIPREQRNYPVPVEEIWRYLQDNTKFMRMLTIRKGARSRMVMVGDRLHITRRVNAPILDCHTFAVCSPTQTGCRMTVYSATDYRIKLMYKTMGLNSVNLDDIEDLRAGKAGLDGLRRLGINIDASHLETDDFNSWKTILHKALNANPLTALFDMTLDDVYTSYKKLVEQENDLLELSKTINKYAYSIGTNVGVCIPSGHGKTTTVNLMRKKYHNFNIIDADECVTDITVLQSYNYERVMQGYASDISKNLPNNNKPTILFCHDTQCVPDNYKTIIIFNKQTPYTPERLWKSENEGSLKSKTHLYPTFHLNFDEIELTVLHMAMTSRVPSIKLSAKSEIIDPMPSEEAYQFFTDPGADLLYYMPQDGNVAFRDHNHGISQQRIYKQGPHVGLCRPAVQMLANATFNAVSTRVKGVQKLRTNDFNDKEYLAKMSHWFKPGWENKLKEYQEEVITPSVNAALEWAINKGHKVELMRDMVESVMDYEQAVEYTNVQAHFKTENLLKENVGELEHQIGRIIIWHNQNLNMIMCPMINECKKRLVLLFDERKITYSDGMDMVQLNSLLSKIKPTKYLVELDLSKQDRQTDKQILHYEHWMLEKLGLDGRVCSYMNSLLGGFSIKTPDGVNTKTPAIHMSGGAMTSLGNEMRNLLLLSDICQNKEINHVFTLGDDSLIMTNDEFDGKYVGLVAASNHNVSCTFNQSTTSGVFLQLIIAEVNGKYVATHNFKRLREKLAYSPYGSHTDEYKSKVASYLLMVGESPYTVTRMQQLGFDSFVPMGTTFEERLQANAIHHNTDGAEIVNTINDLVVLSYGKHQEILTIQGVGVIRYKHLKAGFHAAGERVSDQTLLAKFQHAMQQYNENN

SEQ ID NO: 1384 - protein, 3491 aa, Sclerotinia sclerotiorum endornavirus 1-WX
MSQSITHTTITTKTITDAQTNTHKRAFGSLLKDYPNKNHQRGTTWFDVVDPPQQQKYWPKLTPNPRWKKLSTSKDAIGKVELGGETQVMASYNCWQCIFGYDLGINTAISLEMIKMTIMCQPEDAAHIQIQASYANGMLHIANPPGLPTGEMTPELFSAQRKFVEHPIEGCIKLIDLVDLYDEGTMVGFTPRTITEKLANDIGVDVSSVDTQQLKKAISDSVNSRGTRAVTKFTDQAIILPTSCPEEIVNDLNNEFGNATFIRGNKEHHPHIYHNASRKAVTNLLCGWHGRDALIYDIGGNPASHLNAGRFTVHSVYSKNQAADNARHIKWSKQCVAWARRNMNNDSNHSVVNGVANSILMPNSALWCSDGINKCVHSSKHGSFGISIDTLFHLPVNDLFDFYMRNKIFHTVHAITLPNNYSYARSGALKYNEGHWYKKGDDWTIEFNGESLAYSQSIALTDTYLSVPLHNIGEMVVYCKVSGYKGAHLIIEHYLIDRAQLDQLYLKHVMWFNTNMDELFVMVPRINMDQSTTVMGRIPYTMEQVVINVRFYERLLNRLMQSYTWDSVLSYAAGLIGRVYATSSGLHMKWNLTNSQVRDHCLIAYWTTNRINESIKPLLAQAERASRDPDFLTSLWNSLKNWLKDFGSQFDPTGNTTVQKFIADNKGDTLRLIQMFNSTVRSVESLNVATQMVHSRSVVDWVASSTGVSYRRLDVDIDTWRMKQDMSGNKMTVYDHIEFKDAKPAGVNIGCLTTKTCPHDHKPFHLHLSDLNRRMGNCACCGVISNLNITKLCTICSDILPCHGKNLRCTHTHEQLNDECCSLAKCTCRKDKHCSCCGLPSVNMYCKVCQFLPDKSVKPQPTTTVDDNNITIAPVIVKPTTAKKEAPVRFTFEKPQATSTNDDVKDNTTINHPLSTNNNFKFDALKEQEVDKIITYDDETTIKEDNKEIHSIDAESVGTVDTNIDAGRSINNDVGPLLPEEDVAGIDQINTLMRAVVNVEDVNPGHADTILTRLPPHYQGGLAVRVVGYTDVPGDGTCGAHALSVALGLNVDDVKHWLTIATGHDDWHNSEELAACALAYGRNLICVDIGDTTIYRGGDQDYAGSIIHGTVVGCGAHWLAGNCNILSYSSLFTNKLITDYTNLLRAAHLALNGNDQTALAYSHSDFDIDSIIDMGGNIVISHDGISIQHEGGNSRCQISDKSDSMKMIVGPTGSGKTTTAFQHIEGKVLLITPLRSAVNNSFDYLRNKVKVVARAQGAWIPDNIDMKDINKSDLVIMTMETLYSGIFIGHDKKNIYHQLVSARAIICDEVHEISPHYARLLTVLPKNKTYVCSATMPGIKLDYNCKFDVTTNFVQGDTIDYWFNEVKSNKAMPPNTCYIVGTKNECTFAEMPADIKAINSSTINNISINDVGKCIATNIVTTSITMPQVTNIIDLGVRITSDVIIKPYLTDVEKNIRFFNYSKRLYSWAEMTQARGRVGRVSNGMFYGPCPDKTTRQSNIDALLNSCYTRVPCYSGLLHEWQMVNQKNYDEVVNYFTTLGNTFDNKPTWWQEFQSWQDSVAELLQCKNSNQQPVFVDEYINKEDILALIPNYIGTNPISTSLKHAKHRVGALRYSCTIDWDNVLPKHLYEATDNIDFESLVISVPDSSQFLNIETDSNEDIASKLRLLAIASILNAIKGLMARGQIYINTNKWSDQHGQYILYDSLEDAQALSGINLSEYDIIGLVDIKKSSMRITHYQQSNKWVGHVIVPTYKTHHYMGQLTDIGLIRDRQAPLVDTLRNSTLYVGPPGSGKTTMMISENKSSYTTTISSGQLKNHGTWLPPSLIPHSQENINIDEVGLLDVSVILSLASRSNKLTGTGDISQVVHTANETNAYYTGFDSGIDLFSKYANKIYLDKTHRFGPQTCNLVAKLGFEINPTNMDKVEEIKGYVCAINDNKSYSKVLIASEPDAIICATNHLARMFRKITQIPVYNIAKCQGIDTPNTLVVLQGGQIDMLANNQLYVALTRHSQCVSIVVDPPHAALLMQLCIKTENMISYTDALGGASNITQPILNHIIESNKNNLLKDAQVMNYLTTICALQSGKITPNTMIVIMDQMNFHYKNCPFRFVRLKEIKDIKQLECVVSIYGIQCVVYDVSLTNERELLSCLLSQVTTNKHIKEYLRNLPRKFITTGKKIGYNLYLWLSKFMKDNITILSGYFNTNEDINIGGSTDLSHIIWLAINGVHSAFMTLVHILDDVGSKLSKYTDGSYAAEQFKELLIETWKKSNPFSFGDLKISNSLMSLYKLFRDHLSKGVNTLWDFIKYVVSTLREWWHKQFNVDKPTYYELEGTSMSLIATDSPCINIMRNSLDGDHSLIDGSPTIPNTQYITQLDNLIDNSIIGWEKKATPSPTCEDCPDDVQDVLDEIEVLFDYEEETINHNPTVSSEHLEPSIDEFGQMPRLSSSEPVEIKDNMSSVGIEHPEPTLDKSTQIVENNPIELDKGINESKQNQCLCMETCSDWQLADNIVTNLDLNTYKPNLMGRMVIEKIPGGIKINLKLPGVGKFNAVTKKCCGDNTHLIYVTVNGEQITLKIDKTASGYALYCMPDVVDVNFSQLEQAIKMLSKLGGGKLNNGMTLLVDSLKITRKFIKKLIRLTHYKLKYLMGRINLRHLTSNRSNLEVYRTICHRLPTSYSNSKFSTRECIGGTVLSTIELVPNNAANRSEIFIAIYNVNGDTQILIFTNDNNYSNYITRRLMTPIEHGDFAGDRSAISALLRLGIDIKSIMTQDNDLTINDIKKWLLANPLTSMFDVTDQRTYNNAKEHSIVEKHLFTDIHNILDKPLDIKYAFCIPSGHGKTTTVNRIRRSNQEFTVLDVDEVQEQATILHLGFEDKMLNYKGKLEKYIANSTKPPDAVFIHSPICAPAGYKVIIIINDGADVPLDRIWSGKNVNHLESMNNIIHTRNYDDVYNVTINYLNKKLTGDITLEDGTTIVDNIDSILGDSFMRNNPGYDDIYRLPTGKEDILNMSTGNIGLGEQRFFKTGPHPEVMRPTVNKIPSALPNAIMTRLMGRVKYRTVDLGIKDYHKLMTKFFISGYESKLASYTDDPINLNYEDILTWLVAKGNKIQLLDNMLRSVKDDEFATDPANINVHYKVENLMKEQVNDILDQVGRVIVWNNQNINMYACPVINEAKARFKSLLKPNVIYTDGMTVADMNKSIGQYRSRWLLEMDLSKQDRQTDAQILIYEWKLMGMLGVPDILIEFMTSFIPTFRINGTSHETAKLPAIHFSGGAMTSMGNEIRNLLLLSDCIGENYVAIYTLGDDSLVLMNTKPDLELYKRICASRHNVQNTAVASTKCALFLQMIVARNEDGTYYLSHNFVRLKEKLVYSTYPNTSSDWKMKYASYLMMVGYSTQTKKAMEYSGFVSFPSLGTTMSQRVAANALYNEINDIQVFNIINDIINAKQQVSEEIIIQLPVIMTGNKLKSGMTRVGKYVDNHNKMHELLMQYMEEHTDI

SEQ ID NO: 1385 - protein, 2469 aa, Sclerotinia sclerotiorum endornavirus 2-A
NNDDIQPSSNDIGPLLPEEEVAGTEQLSTLMRAIVSVEDVNPGHADTILTRLPPHYQGGVAVRVVGYTDVPGDGTCGAHALSVALGLNVDDVKHWLTVATGHDDWHNSEELAACALAYGRNLICVDVGDTTIYRGGDQDYAGSIIHGTVVGCGAHWLAGNCNILSYSSLFTNKLMTDYTNLLRAAHLTLNGSDQTALAYSHSDLDIDSIIDMNGSIVISNEGISIEHKGGNSRCQISDKSDNVKLIVGPTGSGKTTTAFQHIEGKVLLITPLRSAVTNSYNYLIDKVKVVARAQGVWIPDNINTKDINKSDLVIMTMETLYSGIFIGQDGKNIYHQLVSARAIICDEVHEISPHYARLLTVLPKNKTYICSATMPGIKLNYNCKFDVGGIVGTKSECTFAEMPTDIKAINSTTINNVDINKVDKCIATNIVTTSITMPQVANIIDLGVRITSDVIIKPYLTDVEKNIRFFNYSKRLYSWAEMTQARGRVGRVSNGQFYGPCPDKTTRQSNIDAILNSCYTRAPCYSGLLHEWQMVTQKSYDETVSYFNKLGNSFDTKPIWWDEFQSWQNSVAELLQCKNSNLQPVFVDEYIDKEDILALIPNYIGTNPISTSIKHTKHRVGALRYSCAVDWDNVLPKHLYEATDNIDFESLVISVPDSSQFLNIETDSNEDIASKLRLLAIASILNAIKGLMARGQIYINTNKWSDQHGQYILYDSIEDAQALSGINLSEYDIIGLVDIKKSSMRITHYQQSNKWTGHVIVPTYKTHHYMGQLTDIGLIRDRQAPLVDTLRNSTLYVGPPGSGKTTMMIDENKSSYTTTISSGQLKNHGTWLPPSLIPHSQENINIDEVGLLDVSVILSLASRSNRLTGTGDISQVVHIANETNAYYTGFDSGIELFSKYANKIYLDKTHRFGPLTCNLVAKLGFEINPVDTNKIEEIKGYICATNDNKSYSKVLIASEPDAIICATNHLARMFRRITQIPVYNIAKCQGIDTPNTLVVLQGGQIDMLANNQLYVALTRHSQCLSIIVDPPHAALLTQLCVKTENMISYADALGGASSITQPILNYIVESNRDNLLNDAQVMNYLTTICALQSGEITPNTLIVIMDQMNLHYKNCPFKFIRLREIKDIKQLECIVSIYGFQCAVYNVSLTGERELLSCLLSQVTTNKHIKEYLKSLPSKFMTTGKKICYNLYLWLSKFMKDNAAILSNYINTNEVIDIGGGLDLSHILWLAMNGVRSAFMTLVHILDDVGSKLSRYTDGSYAAEQFKELLIDTWKKSNPLSLGDLEISNSLISLYKLFRDHLRNGINTLWDFVQYIVSAIRNWWQNQFNVNKPTYYELEGTSMSLIATDSPCISMMRNSLDGDHSLIDGSPIFTNTQYISPLDSLVDNSTTGWEKKAIPSPTCEDCVDDTQEVLDEIDVLFDYDDETSNEHNSFANSTSSKPAIDEPHHIKESNPSELEDKKDNKRDKCLCMEACDDWQLADNIVTSLDLNTYKPNLMGRMVIEKMSDGIKINLKLPGVGKFNAVTKKCCGDNTHLIYVTVNGEQLTLKIEKTVSGYALYCMPNVVDVNFSQLEQAIKMLSKLGGGKLNNGMTLLVDSLKITRKFIKKLIRLTHYKLRYLMGTINLRHLTSNRSNLEVYRTICHRLPTSYSNSKFSTRECIGGTVLSTIELIPNNAANRSEIFIAIYNVSGDTQILIFTNDNNYSNYITRRLMTPVEHGNFAGDRSAISTLLRLGIDIKSIMTQDNDLTINDIKKWLLANPLTSMFDVTDQRTYNNAKEHSIVEKHLFSDIHNVLDKPLDIKYAFCIPSGHGKTTTVNRIRRSNQEYTVLDIDEVQEQATILHLDFEAKMLNYKAKLEKYIINSTKPPDAVFIHSPICAPAGYKVIVILNDGADVPMDRIWSDKNVCHLESMNNIIHTQNYDDVYNVTINYLNKKLTGDITLENGTTIVDNIDSILGDAFMRNNPGYDDIYRLPTGKQDVLNMNTGNIGLGEQRFFKTGPHPEVMRPTVNKIPSALPNAIMTRLMGRVKYRTVDLAIKDYHKLMTKFFIKGYETKLASYTDDPINLNYEDILNWLIAKGNKIQLLDNMLRSVKDDEFATDPANINVHYKVENLMKEQVNDILDQVGRVIVWNNQNINMYACPVINEAKARFKSLLKPNVIYTDGMTVADMNKSIGQYKSKWLLEMDLSKQDRQTDAQILIYEWELMGMLGVPNILIEFMTSFIPTFRINGTSHETAKLPAIHFSGGAMTSMGNEIRNLLLLSDCIGSNYVAIYTLGDDSLVLMNMKPDLELYKRICASRHNVANTAVASTECALFLQMIVARNEDGTYYLSHNFVRLKEKLVYSTYPNTSSDWKMKYASYLMMIGYSTQTKIAMEYSGFVSFPSLGTTMSQRVAANALYNKISDIQVFNIINDIINAKQQVSEEIIIQLPVIMTGNKLKSGMSKVGKYVDNHNKMHELLMQYMEEHTDT

SEQ ID NO: 1386 - protein, 4184 aa, Sclerotinia sclerotiorum endornavirus 3
MGIYIKSTITTMSNYTKPNINTMDQSPRKKITNIIDSVALGANNRIMTLEKASNNKQKQTKTQETDKTDISSFGTRSLTHTIDHSASPPSYLSDDGSSSVNHNRYKGPLATLATGETRPHDRVERKAATDFTDIELYSGNSDKLNALQIQIPSDKSEFNEAPTTFTEMGFPKHDIPEPWYVKMLSTFRSSDTNAGHYKSLHGVSPASQTVTPWKRTDVPKPIEDVLDNSRTPDTPTLSSARKSCLWVAMHTLNPRGMEQIPINISNLKYLDYQKYKVWRAGVTKGWLAIEIRRDHSKNHLHCLSGNYEEQLLSGDGKLTGVIHWTKMFTEINNESQLSWGQLNWSNPDAGLVGAKATVLEKLAHDLNVPLSMLDSGAVRAQLASTIASMSDIAVKPRDTRVEQLPNDTSDLVIDQLSRDYGNFKFIRGSSGSHPHPYHNAARHVITRYIVSLFPKSDLLYDIGGNMLYHVQNGDWHVHSVFKAESYEDKSRYLTYTTAVVKHISVRKSQTNITGATNSITQSMLSKVLTADNKLWCNSAWGDCQHGTKNHATFAMSVDTLFNIEPSELLKGYIAHKVIMAKHALTVPKAWHMADSGTLMFDEGYWSKSDGNLNVVFPGESMTYQNSISLIDTYTKRPLIMGDSHAVYCRVNGYKGPHLMIDHFVLPRTLVIEQFMKHTIWSNPDTNTIVVVVPVIDIHAPVTLLKQQPFTMEAMVLNIPFYEKLMNRLLQPHTWEGLTQYAAGLVGRTYGSASGFTRQFDITNRDVKNHCLVAYWSNNRSLESIRPLVKRAEVDVHQPSFLQQLWSSLKTFLTELGREFDPTETDFIKKLVSDNSEDSMHLGLLLDSAFKAIDSVNASTRLDVSHYITNGMMYETGVTATTKCVDIDTWRQNHVEVSHSTVYTLITGKDDIAPVTIVSCKAAAACQHNHNVAHEHVVGNSIDQRVGMCNCCGILSTLTDQNLCALCGSTRLCHGKSHLCKHEHTVLNDECCGKPACACKKNYKCSCCQMPSSLPVCEMCRNAPPAKTAVWDAGTIKQTGTQAETKLTQPAPASNTNRPDVTEDISDNRSDDDVDNDMPLGMLSDASRHSSKTSAVATNAPSYMNFGDHPSIIPTNTNIIDRAEVQESANSPVDYDDFVNEGSDNSVVSFEIPDDISTINDRVSSERQLDELRKLVPINNQPINEYGFAGLEALSTVYNAIRFTESASTKPVTKLTLPPNLVARQTTVSAVVIAYGEARGDGLCGAHALSQLCDSDVDTVTIILKRVTGNHDWWSDVELAKAAAVLGINVLIATPAGSILYINNSSVRQYVSICTLVSLTGQRHWVPCTSMVDQLYTSDLRNQYYNYIFLATYASMSQDSTKTVADVREAVDRFEPINIDSASIVSYHVDYEWSSIIANYPNGVFTNLGYEHTSKSFYGQPISNYVTEGENGLVMVSAPTGFGKTTRIAEFNDQKKNHVVISPSRATVISATAYCNDVLNIASQGRADSTWHPKNKNDSTLSSAKVVYLTVDSAYMALCGSKPNATWLKMLSGRCIWLDEVHDLTPKYVCLAKALGSLVTGVLSATLPNVPPVTDTLHPIRTIFAAPDQLDNDFNDFIERGPEKGSFWVVPSSTQTAVMPAERVTQAVNSGVKFASITSKTLANLELTTINSAICTNCITTGSTLPGLENMHDLGYRITPELIFPPYKAEIKGISKMRLFNYKRHQYDMTQLTQSRGRAGRTSVGYAAMSLPAAANMPAVHVELLYSLMVGIPANTRCKDLYDNLKTNKVDFDAIKRERDVAVQRGYDFQNEQWDVLDSWIETVSELYLHLKNKIAFTDAMVDNNTISAAFMSALNTDSKLHIDKSVKRRIQTNMHDKLVQYPKLHKCGCGLLTILGKHGCGSQLVLPKPEVEWFNMTIEQSYANGSFSHPKSILAIDTSSSARSVNLSTKLSQQFMSLYFKMLNTILHSAKHATTSNVPTNITHGVLFECINSNKHADISELKHPHKLNNGSVLGVFDSNTRELRLECVVGTTIDCSVTSPQAVVILPVHTANYALGMALASLTMNITLNTAIAVATRSTIIVGPPGSGKTRELHRLFDSDQHTKRIVSKQTGQISEFKNLTVPPTAAIFADNVETIYVDEFGLMTASDILLLSTKCNVMVLSGDVNQKVADDTDLDTSTTLDLSWFRDNVGSTTVFNESWRFGSKTASVLNYFGTLGPCHNENDKGIGMVQFNWLTKKNINSIIIDHDIQLIITHSNALVMQIKQILGPNSNINCMTTGRAQGSQEKRVLYVAYGNASETYTAAELYVALSRHSEHCIIAADYTFEATAKTYGFNRHMQNVETMRYGATIVPKIRDLSMSYIMEAWSNIRYNYHEFAEPKYNKAFDNYVGYYNALTHCAEYLTNDVSDTNGLDISISACVIYNKLYRGVDDSEFTQPLTPQHLEVYNGMTNIFNTFGPGITVPVERTAKVMSEYLRPIASVRQYFIIPFSTNVKLVGNANNFTSYALCNVLTGEIVMTQTNNLTFQLPTANSLRSFVESMKNSVDWDKDMCVQMSISEILFQRLKRSIAKSYQEMINASESIHNYTISNMPTLYSLSCCKVTNLPKSLTLFETIANSLQTNSPSPSAMITKVYLDAVNQLVEGDTPRGSSLGYATLSEELIYDALVSILREFYVHDNISLFISQVCDITASSFEISEPSNNTHVLTLPIKRLHQTVEHLHKHIHNVVVVDVKQRKIIATLDIPPSTEHYWHIDDLYKRTHALLVLGLLDDQINTYNNYKLSDVLSNIKKTATKAITAQEQFFSKLLKYIKNIINSLGVKMRKGKEMLNLCGLQQLFAARMKQSDKFTQSAVKARFDSYSLATSTLKNHAIKGLQHLVLGHISEHYDIDINKQLQRTVASAVRMTHDNRAGDDSSTSLLLRLYYSLKFYAQGYESGAADIMGYDVFNIGNVKVTINESLPVMLLRRLNDDARSSLMGEASRKQTVKAKRTQANNTNRWDGQSVGLSIKRMFATDGGNTSDDAPFDDLLYELKATLSDSVSVTTLENANRHGMVKLNSLKMVLAMYPRVTTTMLTVTKAYYELYNHVFTPMLAVLQNTIGRSLVKVKNSIVRFLEYDATLADAKLEIQDLRDSLDSVRQSPVLTSLEPTPVSDDSSEAESSMYEDAHDGMSNKMEPSSTDKIHENSVLAEYVKQQLMAGNGSIDGSLFTTCGSDVKTKMVYSQRKKYKSSMFVKWEHQENYSTVHARPLPKITMGTLDGVIYMVVDKVALKLVPTYEGYKIWWNDANALKNENKLCIGLNLLTRIAGDSAGDVILALITKVFTDVINWCRLTKDELVWKTKYLAGGVCRAKYDYSFSTTSLYHILQDSKPFRRLMCHDTRSRFIMVGDKIHITRRTEALVLDCHTYAVACNTATGCCLTIYSALQSRIDIMVRAIEANMVAGLCDYTDRAGKSGLDGLRKLGINIDSNTLSDIDFAKWKEILRDALENNPLSAIFDMGLDDTFTSFKQLMESEKAMLDIESRVDSTISLLKSKVAICMPSGHGKTTLKGTLQRKYTSIDVYDADDYITDVDALGWSNFDRMMMQYKLRLSDAVGNSGNNKPKLVLCHHPDAVPDGFSVVLFMNKETPYTPERLWKRTNEERLLMAQDRYPLYTVSFADMEHQTMLFMLRSGATPSIKLHAKSELVDPMPYSEAEQFFQSPGPDNLWHMPIQGRLGVNDHRLGTAQQVIYKQGPHVGLCRPTVQMLCSSTFNAVSSRLRGIEHLRKVNFSREEYMVKMSYWFKPNWRDILRDYQNEVVMPSVSASLEWAINKGHKVELIRDMAEAVLNYERAIEYTNIQAHFKVENLMKENVDELEHQLGRIIVWNNQNVNMILCPIVNECKARFKNLFNDNLLTYTDGMDMVSLNKHLSKNSRSKYMIELDLSKQDRQTDKQIIDFEQWLLTELGLDGRVVHYMNGILDGFSLKTPDNVTGFMPTMHLSGGAMTSLGNEMRNLLLLSDICKGKAVNHVYTLGDDSLILTDDDFDGKYVAIVAANNHNVRCTFTTSEDSGVFLQLIVMWVNGRYIAVHNFMRLKDKLAYSPYNADSDEFKSKTASYLLMIGNHYLTSKRLLELGFNGTVPLGTTMEDRLEANALHNNCDVADILNIIHDIVVVSYGKHESKITITGVGVLSYRHLKSGIHMTKGRQSDTSLLASFQSAVQQELDSN

SEQ ID NO: 1387 - protein, 3799 aa, Sclerotinia sclerotiorum endornavirus 8
KQPTKHKQHFTTMSYQTAATNSNNNKRSLGLLPKYLPRKNMSRSDDFINMDSDTYAMTNSKVSRHNHPKISKLSTSLRIMREDVYGPLGAISSRRNYVYKDLICHKCLDEHNKICSDEDKLTYDNFAKYRNDIKSRKTIGGFIYKSYFHLKLDCEIIGNYKPVFPFLNELIETSVSFVALINLIEPEKTVKPVTDPVVGGDGFCWKKIFPFSNYGKFMTYAHFKQQLEFKYNGVFKMYVLLIMTEDGNLHLEDVQSFGFGKDEYLGPELARGAETAIGKAAPPSAWVHVCKLPESHTDLPCWNDSLHNVKIETRETEPNGLISTKFMKIDQSDNTLPHELWNPNKTLVRCSIDNLIETLVSKIGNDKTQNKYSTMRYGLCYYSGVLVMYRWKFVDALSNFTRHYSIEEFTVYLRTLNMQVNKFKEIRGLSWLKEGIVSTESDATDVRLSIDRLSDATNIYMNGWTNTTRCALVGYTPKTMLEKIANDIGLDSSMVNTNQLNNAISDMVNKRVTKAVTKHVDNAIILPSSCPDDIVNDLNNEFGNGTFMRGNTAHHSHVYHHGSRVAVTNMLYNWHPREGLVYDIGGNPNVHLNAGHFNVHSVYSTNKAADNARHIKWVKNATSWAKRNCDVAKQPSIIPGMAKSILSDQNGVWCDKGLKNCVHSNKAGSFAMSIDTIFHIPLEELFDFYVRNRVIHSVHALTIPNDYSYRSSGTLKYNEGHWYKNNDVWTIEFNGESLPYTQSIDKTNVLLSTPLFTLGELVIYCKIGGRRGAHQIIEHFTLLRSELDSLYAQHVMWFNTNMDELFVMIPRIDMDKSKTLMGREPFHLEQVVINIRFYERLLNRLMQSYTWESLLSYAAGLIGRVYATSSGLHMKWDLTNAQVRDHCLVAYWSMNHINESAKPLIQQAERSNRDPDFLTSLWHSLKNWIKDFGSQFDPTGSNVIQDFIAYNKGDTLKLIQMFNNASKSVESLSVATQMVHSRSIIDWVSTDLGMIYEGVNISIDTWRLSTQMQDKLPTVYDLLTYQSSEKMYKRSLCAPLPSCTHNHDTLHSHVTGPQGRSAKCVCCGIFSNINTNGGCNLCSGSAPCTRKNLKCQHEHTTINDECCSKKQCTCKKTFACLCCGLDSVGCYCNVCELSPKNNIVTQSGKPATKQQNYQAATNMPNATNDTNTYDTKATGPPELSREFGFKQSFNSDNKPETDKMSENNSDEDTITEPKNSIFTAKPANDEPSMAAENPNSGDVNPSDDNDDTFKFVKAKLAPLDELYADSSIISYPSPIINITTEERDYNHANINLLPENYSGAIGVKVVNYVNVPGDGHCGAHALARALHIDVESIKKWFSIALGHDDWNSSDELVAYAQSINKNIITVEKDAAILTRSNQDDTAIAILHGSLIGLGMHWVPCECIIVSYASMFNVRINHTFQDMLAALPATDVMNDEITAFTFSHSRENLSKILAIGQSLVVDYDYISVKTPGHSTNPIVSDHNTNGVKFITGPTGSGKTTFAHTLIKGKILIVTPLRSAVTTTYNYMASKYKVCCRSNSEWAPTEANNNTCHNYDIVIMTIETLYAGLFSLERGNETYTQLIKNRSIICDEIHDLTPHYARILTQLPAHKTYLCSATIPGISTNYTNTFDTTTSFLANGTFDKWFNNDIARDDINNSTCYIVGTKNETNLFKNKSICALNSDTLNRIDVSNASKIVATKIAATSITLPSIKTIIDSGVRIYAEIIFEPTIKDKTIRFFNYTKYNYSWLEMIQSRGRIGRVQDGFFFGNCPSDSTPLSVDSMLLYSMYTNTICPSSLQSIWASITQANYNKIKSQITNLYPTDGTTPEWDNDFTAWKSIYNELLVGKKSGLRPKFSDLECSLENIMLNLGNIVGVSNVTKKIGNSIIETSVMWNEIGFDSKLLNNNKIDFNKLVVNVNDSQSLINIKTDNNQQLSEKLLLMTVSTIFETITGLIASGSAIVNKNTTANQVGQFIVYPNIMAAEKSLGIKLRDNEIIGIVNNSTKTITINIVKNIPSNDTMIVVSNYRTIHYKAEIAAIEAISDSKNNILQTLSNSTIYFGAPGTGKTTAIMKHMEGHYLTTTNTQMLMKNKSWVPPNAVPFNQNLVLVDEVGLMSVTTILTLAAKCNKLLCTADLQQMVNTHSDTHTMYSGYESGLQLLKTFSRNEELTLTYRFGPKTCAMVNRLGFNLKSAVDRDETITSSIGKVSNKKTISNLLFEINPDLIICSSNALARYVRQITSINTCNFAKCQGLEVENVLVLIDNLHNNKKDANVNEFASLYVALTRHTKRVHIHVSTNDASLLKTLNIAPMLGEISVNNNIGGSWTFNFDIYGKMLEAIVDDLCKSNSFNDGISILREWGSGYITSNTALLRMDNFNTNYDPSTLIFNSLHTDVTTGLEVCSVSLFGHSIYLFKLFLDDNKTIVELLTSGLPSGTVVKKFMILIGKKFIKRTGRVTAKLISAIASIMSIPREIYEFVMSFDLEDKHNIGGGINIGHLFGMALLGIKKAVVLLIRITGSIKDKVMSSVDGKLTAQFLKDYFYAYFNTTYSSDVGGGVWPSNIVNLFHACNEKVSNAATHIYDWICSIIKKIVAFMSKNNKDGDVVNDTHIGTDQQNKQYHDHDLKDRSTLAKNTVGNAINKNSRKLSVTFNEQAINYYNDGNTEYTNLDGESKKLSRAQRATLQLNKQLNISDKETNSPILMDCDTDEWTDDYELLFDYDEIVSELGAESSQSLTDAGNCENRNYDYKTQASASHNATDNDIADLTTLNKNLNVNDTTKKIEVTEPQSYNDVSTKPSRLEATKLADYTYISDVKTKLNFNTFRPNFVGRMVMTVKEGTIVANINIPGAGKFGITVTKLETEGEHKIIVKDNNSTTDLIMIKTDDGYGVYSHHNNNAFSMEAFGTAIKHISKLGGGQNDSAINLINDILKTVYQFGKKLIKLSSYKILYVAGKVSQRCLVSDNDCLTTYRKLCKRIPTCYKFSKEYQYSTSGGTTLSTIEIMSTNNSPTKLFIGIFEVFGKTRVVLYSNNVGLTNILERLLLTTNAQAYNDEIGGSDGAISALLKLGINVKDILYHNNDLGVNDIKKWLYANPLNSMFSTSDEPTHTSYKSLLYQEMHMHSELRDKLDKTGTSKRKIAFCIASGHGKTTTVNRIRRQNLEFNILDADEVQEQANILLLPFTDKMLNYKAKLEKYSAEHPQLDAMFIHSPICAPSGYKLVTILNDAAVVPVDRVWSEDNVEHLSKYGSVTHVNGYEDLYKLCVSYLNKTATGDITLENGATIVDNIDSILGYDFMHNQPGFDDLFRLPVGSQDRLEFSNGNLGLGQQRVYVTGAHVDVMRPTISKLPSALPNAITSRLMGRQKLRSMHMTIDDYEHLMSKMLIKDYKTMLEIFSQDTISINYRDILDWLVNKGNKLQLLETMLKKVVNDEHATDPASISVHYKVENLMKEQVNDILDQVGRVIVWNNQNINMYACPLINEAKARFKMMLKPDVTYADGMTIADLNESISKYRSKWLLEMDLSKQDRQTDMPILKYEWDLMRRLGVPEDFIEFMTSFMPTFKITGSNNEKAKLPAIHFSGGAMTSIGNEIRNLLLIADCVGNNYTAIYTLGDDSLVLMDSKPDLEYYDRICRSRHNVINTALCDKQCALFLQMIVNRDADGTFYLSHNFQRLKEKIAYSAYPNSSSDWKMKYAAYLMMIGYTKQNYNAMIEMGFATFPHLGTSMSQRVSANAIYNKISEVSVFNLINDIIQTKNVQSEEIIIDTTMVMTKSNLLNGYKRVGPYVDNHATMLNTLQEYFSEHN

SEQ ID NO: 1388 - protein, 4500 aa, Sclerotinia sclerotiorum endornavirus 9
RSNYTKSNTNTMNQSPRNKITNIIDSVALEANNRIMTLEKASKNKQKQTKTQETDKTNISSFGTRSLTHTIDHSASPSSNLSGDGGSSVNHNRYKGPLATLATSETRPRDRVERKTATDLADVELYSGNSDKLNALQIQIPSDKSESNEAPTTFTEMGFPKHDIPEPWYVKMLSTFRSSDTNADHYKSLHGVSPASQTVIPWKRTDVPKPIEDVLDNSRTPDTPTLSSARKSCLWVAMHTLNPRGMEQIPINISNLKYLDYQKYKVWRAGVTKGWLAIEIRRDHSKNHLHCLSGNHKEQLLSGDGKLTGVIHWTKMFTEINNESQLSWGQLNWSNPDAGLINFYHTLFRSTNTSISTSLYIHCEKSTMRELIDYQYPGFKQLGKTFALPEPFPTPMPLGVLIEHFKLKINLKKGQQLTSILRNAKHHYTLTLIDQSNIELRKVPATFDDSSHLSFRALDTILSTIYSMSQDRQLAMNNQKNQKILPKPMVGGKGDCWQQITMFYAYTELWFGRTDRSDAMPMEELYEIIKKKALVEYPMFRFTHEGDNMYHVEYVGLDRTHKPSYKEMWTEEEYAEIMAEVKVKYAGCYRLPDLAIEFKRIIDQKEAEHMSVEIDLAFECTAYIDKMYDLFVRDDYITTEEIDNDVDNFFNAVEAVLTQYEGDNMLLVGAKATVLEKLAHDLNVPLSMLDSGAVRAQLASTIASMSDIAVKPRDTRVEQLPNDTSDLVIDQLSRDYGNFKFIRGSSGSHPHPYHNAARHVITRYIVSLFPKSDLLYDIGGNMLYHVQNGDWHVHSVFKAESYEDKSRYLTYTTAVVKHISVRKSQTNITGATNSITQSMLSKVLTADNKLWCNSAWGDCQHGTKNHATFAMSVDTLFNIEPSELLKGYIAHKVIMAKHALTVPKAWHMADSGTLMFDEGYWSKSDGNLNVVFPGESMTYQNSISLIDTYIKRPLIMGDSHAVYCRVNGYKGPHLMIDHFVLPRTLVIEQFMKHTIWSNPDTNTIVVVVPVIDIHAPVTLLKQQPFTMEAMVLNIPFYEKLMNRLLQPHTWEGLTQYAAGLVGRTYGSASGFTRQFDITNRDVKNHCLVAYWSNNRSLESIRPLVKRAEVDVHQPSFLQQLWSSLKTFLTELGRQFDPTETDFIKKLVSDNSEDSMHLGLLLDSAFKAIDSVNASTRLDVSHYITNGMMYETGVTATTKCVDIDTWRQNHVEVSHSTVYTLITGKDDIAPVTIVSCKAAAACQHNHKVAHEHIVGNSIDQRVGMCNCCGILSTLTDQNLCALCGSTRLCHGKSHLCKHEHTVLNDECCGKPACTCKKNYKCSCCQMPSSLPVCEMCRNAPPAKTAVWDAGIIKQTGTLAETKPTEPAPASNINRPDVTEDISDSHSGDDVDNDMPVGMLSDASRHSNKMSAVVTNAPSHMNFGDHPSIIPLNTNIIDRAEVQESANSPVDYDDFVNEGSNNSVVSFEIPDDTSTINDRVSSERQLDELRKLVPINNQPMNEYGFAGLEALSTVYNAIRFTESASTKPVTKLTLPPNLVARQTTVSAVVIAYGEARGDGLCGAHALSQLCDSDVDTVTTILKRVTGNHDWWSDVELAKAAAVLRINVLIATPAGSILYINNSSVRQYVSICTLVSLTGQRHWVPCTSMVDQLYTSDLRNQYYNYIFLATYASMSQDSTKTVADVREAVDRFEPINIDSASIVSYHVDYEWSSIIANYPNGVFTNLGYEHTSKSFYGQPISNYVTEGENGLVMVSAPTGFGKTTRIAEFNDQKKNHVVISPSRATVISATTYCNDVLNIASQGRADSTWHPKNKNDSTLSSAKVVYLTVDSAYMALCGSKPNATWLKMLSGRCIWLDEVHDLTPKYVCLAKALGSLVTGVLSATLPNVPPVTDTLHPIRTIFAAPDQLDNDFNDFIERGPEKGSFWVVPSSTQTAVMPAERVTQAVNGGVKFASITSKTLANLELATINSAICTNCITTGSTLPGLENMHDLGYRITPELIFPPHKSEIKGISKMRLFNYKRHQYDMTQLTQSRGRAGRTSVGYAAMSLPAAANMPAVHVELLYSLMVGIPANTRCKDLYDNLKTNKVDFDAIKRERDVAVQRGYDFQNEQWDVLDSWIETVSELYLHLKNKIAFTDAVVDNNTISAAFMSALNTDSKLHIDKSVKRRIQTNMHDKLVRYPKLHKCDCGLLTVLGKHGCGNQLVLPKPEAEWFNMTMEQSYANGSFSHPKSILAIDTSSSARSVNLSIKLSQQFMSLYFKMLNTILHSAKHATTSNVPTNITHGVLFESINSNKHANISELKHPHKLNNGSVLGVFDSNTRELRLECVVGTTIDCSVTSPQAVVILPVHTANYALGMALASLTMNITLNTAIAVATRSTIIVGPPGSGKTRELHRLFDSDQHTKRIVSKQTGQISEFKNLTVPPTAAIFADNVETIYVDEFGLMTASDILLLSTKCNVMVLSGDVNQKVADDTDLDTSTTLDLSWFRDNVGSTTVFNESWRFGSKTASVLNYFGTLGPCHNENDKGIGMVQFNWLTKKNINSIIIDHDIQLIITHSNALVMQIKQILGSNSNINCMTTGRAQGSQEKRVLYVAYGNASETYTAAELYVALSRHSEHCIIAADYTFEATAKTYGFNRHMQSVETMRYGATIVPKIRDLSMSYIMEAWSNIRFNYHEFAEPKYNKAFDNYVGYYNTLTHCAEYLTNDVSDTNGLDISISACVIYNKLYRGVDDSEFTQPLTPQHLEVYNGMTNIFNTFGPGITVPVERTAKVMSEYLRPIASVRQYYIIPFSTNVKLVGNANNFTSYALCDVLTGEIVMTQTNNLTFQLPTADSLRSFIESMKNSVDWDKDMCVQMSISEILFQRLKRSIAKSYQEMINASESIHNYTISDIPTLYSLSCRKVTNLPKSLTLFETIAESLQINSPSPNVMITKVYLDAVNQLVEGDTPRGSSLGYATLSEELIYDALVSVLREFYVHDNINLFISQVCDITASSFEISEPSNNTHVLILPIKRLHQTVEHLHKHIHNVVVIDVKQQKIIATLDIPPSTEHYWHIDDLYKRTHALLVLGLLDDQINTYNNYKLSDVLSNIKKTATKAITAQEQFFSKLLKYIKNIINSLGVKMRKGKEMLNLCGLQQLFAARTKQSDEFTQSAVKARFDSYSLATSTLKNHAIKGLQHLVLGHISKHYDIDVNKQLQRTVASAVRMTHDNRAGDDSSTSLLLRLYYSLKFYAQGYESGAADIMGYDVFNIGNVKVTINESLPVLLLRRLNDDARSSLMGEASRKRTVKTKRTQANNSNKWDGQSVGLSIKRMFATDGGNTSDDAPFDDLLYELKTTLSDSMSVTTLENANRHGMVKLNSLKMVLAMYPRVTTTMLTVTKAYYELYNHVFTPMLEVLQNTIGRGLVKIKNSIIRFLEYDATLADAKLEIQDLRDSLDSVRRSPVLTSLEPTPVSDDSSEAESSMYEDAHDGISNKMEPSSTDKIHENSVLAEYVKQQLMSGNGSIDGSLFTTCGSDVKTKMVYSQRKKYKSSMFVKWEHQENYSTVHARPLPKITMGTLDGVIYMVVDKVALKLVPTYEGYKIWWNDANALKNENKLCIGLNLLTRIAGDSAGDIILALITKMFTDVINWCRLTKDELVWKTKYLAGGVCRTKYNYSFSTTSLYHILQDSKPFRRLMCHDTRSRFIMVGDKIHITRRTEALVLDCHTYAVASNTATGCCLTIYSALQSRIDIMVRAIEANMVAGLCDYTDRAGKSGLDGLRKLGINIDSNTLSDIDFAKWKVILRDALENNPLSAIFDMGLDDTFTSFKQLMESEKAMLDIESKVDSTISLLKSKVAICMPSGHGKTTLKGTLQRKYTSIDVYDADDYITDVDALRWSNFDRMMMQYKLRLSDAVGNSGNNKPKLVLCHHPDAVPDGFSVVLFMNKETPYTPERLWKRTNEERLLMAQDRYPLYTVSFADMEHQAMLFMLRSGATPSIKLHAKSELVDPMPYSEAEQFFQSPGPDNLWHMPIQGRLGVNDHRLGTSQQVIYKQGPHVGLCRPTVQMLCSSTFNAVSSRLRGIEHLRKVNFSREEYMTKMSYWFKPNWRDILRDYQNEVVMPSVSASLEWAINKGHKVELIRDMAEAVLNYERATEYTNIQAHFKVENLMKENVDELEHQLGRIIVWNNQNVNMILCPIVNECKARFKNLFNDNLLTYTDGMDMVSLNKHLSKNSRSKYMIELDLSKQDRQTDKQIIDFEQWLLTELGLDGRVVHYMNGILDGFSLKTPDNVTGFMPTMHLSGGAMTSLGNEMRNLLLLSDICKGKAVNHVYTLGDDSLILTDDDFDGKYVAIVAANNHNVKCTFTTSEDSGVFLQLIVMWVNGRYVAVHNFMRLKDKLAYSPYNADSDEFKSKTASYLLMIGNHYLTSKRLLELGFNGTVPLGTTMEDRLEANALHNNCDVADILNIIHDIVVVSYGKHESKITITGVGVLSYRHLKSGIHMTKGRQSDTSLLASFQSAVQQELDSN

SEQ ID NO: 1389 - protein, 3890 aa, Setosphaeria turcica endornavirus 1
MTTTYTTDNTITTHHQAMKTHTHTNIIAGGTQAPSAAMINGCKNKHGDAELHDKTKSAFEYEYQIKPRGSVRAADTSPVGGDGTCWKKAFRHACSLETIDLMASWTNAMVDIQTFITVYRRLSIAFGKPQMMDNFFFMTMNDSGVAHLVSVYTPSQFEELVESRKLEGIRKSAIRASSLYNPQSGINADIMYVKEAAVEKRDAAGKRYKVKTRPQLKMKLSRHGTPTPDPGVYQDILRWNGYELEEEEWIMLAMLNSNSMKDLRSINSFDELQTHLEMLSELTEISMETLTDSLLDYEVGSTLLERFGITVSVVDNNIAISNRDRSVTVRVPVEAMLEHTGANRLEMYHILNFCYAADGYTVIEPENLLGGISILEQISRDYNVPLSLINNTQLGNTLLETINKVANISVRQNDGKAIEVPETMPEEAFNEISRDFGRFNIVRVNNGNHPHPFHHASRRAVTKMIVSRYPRSDLLYDLGGDFNYHISKDNFHVHSVFKTDNPTDEARYINLSTKEVKSINNRLASLADRQGSQSVAIESVLNTIKSKDNVMWCNNSAGHCNHAPSNKLSFGMSVDTLFHIKPEELIKFYLHNNVVMSTHAMTVPKDYKIKAKGNLKYDEGVWTVSDGNLDIVFAGDSTVYSQEVEVLDTYMFQPLIATNRHVMYTRIQGYKGAHLILEHFMLERSIVDNLIFKHAKWINYNYDVVAVRIPKILLDKPTSLLDREPLDFETEQINIRFYERLLNRMMQPYSWESLKSYAASNVGRSYMTSAGIEQVWKMNNKSVMAHCIVAYWAMNRQVESMMPLVHRAEERARPTGFFQQLWKVLKNILVDIGNEFDPTTISEVQNFFSENATDDLQLVQLFSTLNSQIESLNVANQLSASHNIIDSVLTTLPIDVEVNWTDIDTWRENHDDSNRKTVVDLVVTRGEMPTLKTTCSAHHQCPHNHFKPHGHITFSPSVMPLGLCACCKIDSNVFPDGTCLLCTGHEQCSGYKTTCKHTHKLLNEECCGRPVCTCVLKNTCECCGKKSKDLYCRLCKPDPSTRPKKTTVSRAKFDDEQMVDHRNQGNFDDAPLFDMDGSNILDEESDGAVSITCQQEPQHVDKPTTEDDTVKNATDAISKVDVVTQDLSRQDTQPDGGSGNQHDGDKTHYSPPPQHEDETPTKVDPETSATADKQPTPAIGKTSPGDVSNTKLGQPSMTTATEPTTKLHEDIDRGESILNTIREVTGETSTTYTLHEAMSVGVRRPTFAHKLESGFSSFKLPNYRYKRVNHVDVTITSIGTSLDDGTCGASSLSQISNTPVDAVKEWLKSAVGSAEWSSETDLASFAIASSMNVVICTSDAAHLYMNNTSGIAHAITTTEPLDGNQHWVPCTLEVSLYYSSFVTQELATYYKLLRHLETGGHAEQDWNMVTNYKLRLSDAAAAYTLRGQSWDTILKLFHTSQVTDDGVVHKSEFYSSTNISDYIIKRPSGLSMIIAPTGFGKTTQLHTLHKDSTKLLILTPTRANVKSYVQLMQSKKITVAGRAESTWFPDDSAIKNPGKVRIIVMTVNAAFSALCGELPNANYLRLIAGRKIYFDEFHMVTPEYFTLCSRLGNLVSGVMTATPYGAMFDVTTRHPITSRWQSDEAMTLLLESYYEDGVHDGELLVVKSKQLAYHTASISDKPCASITSETVGQLNLSNCHKAVATNCVTNGVTMPHIKTVIDSGERIILNMKPHINYDSRRVHFFDVVTVRYSVNEMIQSRGRAGRTQPGHFIGPVPSDDNQVSVQDQLLMSLMVGVECSNYCHALFDYISDKTISHANDFIAVNKDSTDTNVLYDVENARSWVETAKLVLTQKKLGKVPVFVDESLTTQFYYDQMVRLLENEGTLSNVGVLKTQRKRPTPVAPAMNLELIKRHITQNCGNRINESQLRNNDKNMFIINMKTKPISWTDDTAGKNLADTVIEILINDYLTGLNTMIVMYKKMLRLENMDGASQGSQLTTMDASKWKKKTLFSFKPNDNQPVLIVDKTTKAATIMTYGMMSNISDGTAIITTNRDLSHMLVSITRVPASVTVARLKLVMSRSQLITGPPGSGKTYKAINDCKPDKFVSKQSLMLVKYGWETPNTVLECSKLGIDEIAMFNVYELLVMAQLADEFVMTGDVNQKVIDDDGLLTARNMDSSKLFDMLNLAKKTVLTRTWRFGHDTLNLLTKIGHNYQANDPAKSEIIASRNIHGKFGDKLRQAVHEASPTLIVCPTNDVLLWLRREGIHGTAATTTSRSQGFESERVMYLMLGQPNSTYTQSELYVAFTRHTKELYIITDNTSQALLQSKGISYPDFTHWDEYDPSRAGCVNISKWRSGLLGQIEGALLMIPSTIDDTIEKWRSESNETHERGLDPYYFTEGQVNDYTYALSSIASFTNGTVYERNNVTASDLLLVDTLLVQLRLSRRSNLQPHQLYTRIKQKQLKLPSNLMFEIKCEKPNGGIYYKRYVISENNMRYVGTSKHCFTGKGNICYTSYDTLTYTLGVAKDRVHLKERLVTLLDAIKASCVALYDLLCEYFGFKSHGVSPTVLAASMIESSNYMPRAWLDASSLAMACDGHKGLYGTWHTKVESFVTAGMNGAEAYEVIRQAAATQGKFLPSAPVDMHELHLNARVVPYSKASKLDYFLNAEGKPVRLVNMTLREAYSALKANTYDPSNYRSGYADVRDIIILRMVNMINDASNIREQVSLLVDEVLLVVDEKFKDRCEIVDSDRFGTRIGKSMRAVMIHKLLRTARGSTLYAVDENAFIESQVDESQDNEVDERAGGINVKITDLLLIIDSIKQWVCESVLKWCEWAADEEDGKSAASSGETMFHDTQEIIDSAGDRKRGIDLFQCCQGNVNIGKGTNDKMHENSNLVNYVELMLKCDNCPERNKIAALTRLFEVEGCDVKSNLNFSSFKPTSGMFKTVTVNEEIKQVIVKVVGLPEVKMHQLANMIVIVVDKVALLAVKSGDHYTLYWSDHNVMTNETLIEKAMKVLGSVAGGSNDVMKLLRRSVIALIKYIRIRKDIFVWTTKAALGVCHTMTLHYNRSAKSCYFSLLNDKYFQRTLKLNSRNKLWLQGNALVYSRRSSATVLDCHTMMFGVSGPDGVTLHLYAGREERLKVFSEHVQHALGTDKRFYNAGKTADGLRRLGINIQANLNTIDKDSWLAIVKQAAQTNPLANLANISTENSHKSYEKIMDDIIEHKRLTAISEQAPTILATKMAICIPSGHGKTTTVQRIKRELPHMNVWDIDDILTTPNVIRMWEYNAALLEYKSAFMSFDETHEKPYLMLCHHPSVVPKNVKTLIIINDKANVPAERIWSSQNVESLVKHSGASISRVNGYDELYKCVVKYYASGCDNQITMTDNGEIVDAIDDFGGYSFFQNNTGPDTLMFAPADGNISVPNFAESLGYQRVYKTGRHVGVSRPTIQKLTTSTFNAISTRLHGIQKLRTEHITSDEYFNALSTLFKGGWENQMEEFRNEPISLSYDDSLKWLINKGHKIELLSNMAENTTIGELSTDPTRATAHFKVENLLKEEVNDMLDQKGRVIVWNNQNINMFLCPMINECKRRLKMLLNDKLVTYADGMTMTDINNKLSTIKKTKYLVELDLSKQDRQTDRPILNFEYKLLARLGLDGEIVAYLQQLDEGFTYTTPEKIKSRRPPIRWTGGAMTSLGNEIRNLLLIADLIPDKNIEHIWTLGDDSLIMTNTEFDEHQTQLISTQRHNVVCTFSQSEKAGLFLQLIVCWIDDTYIATHNFDRLREKLTYSPYPVWSESWKSKYASFLMMIGDTPDVRYQLMRLGYKSLPPLGTSFEQRLFANATYHNIEPEDILLIINDIIASSSTESTELILPLTMIAPRNKLLSGEIPLYEYQEVKVNTASQINQILEAVSGNYY

SEQ ID NO: 1390 - protein, 3653 aa, Setosphaeria turcica endornavirus 2
MSQSHTTTSMPAVESPAPLIKSETQTNFKLGGTMKPRSDAMLGGDGDCWRQTFVGRNGFVSNSSLMYWSDYMVDFHTFGQCYKQVVESTNMEELWEYYFVFTVDSSGLMHQIEFLDEYEVEEFITSHPLKAKAAKYLVSARDIYSKETNVHVDFFEYISVHVRGEITKEKLPFDVLVWDGPELTLDEWILLACYNEDPKCMNVYGDTQLGAVSVLEQISKDYNIPMSMLQNSQLGKQLVDTVNKVAAATVSQSDNRVIEVPATISDTAFNEISNEFGRFKVARVNTGSHPHPYHHASRRAVTKLIVSQYPRSDLLYDVGGDFNYHINQNNFHVHSIFKTGNPTDAARYTNLTKKAVKAVTQRQSQMINKQLSRDTAVEYVLGSVLSTDNMLWCNNAVQDCKHMSKNKATFAMSVDTLMHVEPEDLLSFYMSNNVLAATHALTIPKDFALSDSGKLKYDEGVWSKEDGNLNLVFAGDSTVYSQRIELVERYLYEPILLADNLFMYSRVQGYKAAHLIIEHYMLPRHVLEDQLTKHALWVNYDYDQLVVSMPKILLDRPTTLLGKEAMTMVPVTLNVKFYERLLNRMMQPYTWEALKAYAASCVGRSFVSSSGVEQIWNLNNREVINHCVIAYWSMNRQVEALKPLITRAEERAQPTGFFQQIWQVLKVVLTDIGNEFDPTNLKEVQELVENNSTDDLQLVPMFTNIARQVESICVASQLLRSHNCMNVIGKYVPLVREGEWCTVDSWREEHESSDRRTVNELVISDTTSKVRKEECKNDTCPHNHSKSHRHLAYEASVMPVGECSCCGQLSNLFNDNFCILCAGHEICAGHKATCKHNHKLMHEECCGMVHCNCKHEYKCECCGLPSLSVYCRLCKPNPTRAMDNSAMFNFAEDNAPEDLRRDAYPAHKHMGISLPQVGRLDNDFDIPEGSKEQYAVTQDGPGITKPKTEPLGYYPSTAAHTIRTWAVLQLNIPEALAKPKGGHIIAPILENIREVTDQPMYEYNHNEQMLLGVRAPRFSSSVGKGFGPIVLPPYKYDRSNHVDVIINSLGESDDDGTCGASSLHQVTGTPIATIKEWLLASVGTDQWNSDADLAAFAAATRTNLVVCTKERAMLYCNNHSDVSYAITTTEGFDGAQHWVPCSLKITMLYSNIVTRQYQQYLSLIRYLDTQGSNFEDWRAMATTNVPLSEIANAYNLSKSDWSDILQIFKGGVIDGNGVTHVSSPFTSLHIKDYVVRQPWGLNQIFAPAGFGKSTGLISMFNSRKLLAMVVPARSNVARLVQTINASGHVTVGRANAQWYPSDRSLKKPTDVKMLIFTVDSLHAALCSTAPVMSYVQLLAGRDIYIDEAHCVTRKLVELCHFLGDRIRGFVTATPLDGISDIHSRHTITTNWVTPEAANYLIEDIMEEGVSEHTLVVLPTKSMVREASKNSAGACVSLTSDTLPEVNLQHLTRAAATNTVISGATFPKIKRVIDSGKRVMLNMLPTPRVSKSGTSVYFDIVKYDYTMQEALQSRGRVGRTQPGVFVGPLPTGVATLSTQDALCLSLSVGIPCSPECNRLWEGITVEAVDTVRAQMPYVLPENEDQLSHEEASRDMWLAVADDILSFKSAGRQPVFANSSATLLDAYRYMLSYTQQPGDIMNYGSFKTLHRASIVMPSLDTRVYYAILKTRGQLDVAKKILDIKQSGYVDSLQTTMPVSWAEDAADINIRDVVEEVLLNEIISVINILITNYRAVQQRRVGFGSRNGVQVVKYDQKRHKEGKLFSFKFGTKQPVVIFTDDLSSGTLTEAVHLNNVVDGTTVSTVNRNVSYLFDSLASIPEIVSTSRLRELVRKSTVVSGPPGSGKTRLMMDELRPDVIVSKQSTMISKWSWLPPNAVNEKYKSIGIDEFGMFTVLDLLMLSDKTDKFYFSGDFGQKKSDETSLETARNLGSDILRKLLLTAHNIELKVTRRYGITTLNLLSKLGHNYKPYDEGKTEVIAGRKLYTRSADLFRKAFRDASPTLVITPTNDTLMWLQDQPIKGVEFLTTTRSQGTEAERVMYVMVGCDPSVYDTEELYVAFTRHTRELYILTDIDGQRVLDSLNIKLSPYENWDTTQIYNAGLVNTGLIASTILSAVVGCSMGVAYSRMASYASSSRLSGIKGTGDFTGPNFTFGLSAAVTQHMYGTIKMLEPARVEDSAGYESMMAAAATYDGAKYDMHGFITYLLANTHHVVPDNLIFQVARPTRANMVEYDIYGINECCPVYLGTNNKGVDANQLIIVDDIYEYVDLSADHSVSILSRLSELLGAIKAKSAIFYAYIHAILVGGNTTLEPSMLAKKIVSEESYLPRLWMDASALAMVVDGVVGVYGKHVQLASSYRSAGYDGLGVYNLIVKEATKQGQFLPAYPADLVELHLNAKVQPYGTSATMFRSASGEPVATSTLTLREAFHAIEGNEHHPDAVRAGGCELRHNIIESLVAIVKMEGDISLLVDKLLETSLVMMQTRVEASTAITDKDRLGKKIGKMMKAYIYSLATKHAGAFDSKTENYTIYDISDDPTSDDDLSRYGGMDLPSVLSSLRLIKDCLKSWIVDYLLASCEWAADEEDKRDDCSNASTVFYDAPMPEGVPAVRPESIISLFPCCNPRMSPAPADTDKLHENSRLVEYINMVLKCKQCSQDHKLQCARRNFDVLGTTVNSKVKFNDLKESRGMFSVVTRNDELRMCTIKITGIPQVDIHELGPYYIIIVDAVACMLEPIPGGYKLLWSDHNLMTNQKMLSTAMRLINNIAGGRSDLVKLLKRMLKELTRYILMKKDVIVWTTKAATGVCHTQVLRYKMSAKAAYFALLNDRCIQQLLRLNNNNRCWLQGSTVLLSRRSKANLLDCHTTMIGHEDDKGYMNFTLYAGRESRLLTFKATVEHALGRPGDLARSGEDSLNILRRVGINISKLDDIDALAWLDIVMQATRNNPLSALTELSSDNGYRSISEYLKERQTHDALVALQSVTSYQIQKKIAICIPSGHGKTTTKQALQREFPNLKCYDIDDIVPTASVVRMATYSGALEVYKEAFLQFELEHTTECYLMLCHDPYVVPGHIDTTIVINLGAKVPKERVWSDTNVAALKSHKYNNVSTIKVKNHRALKDLCIKLALNGGKPNITLCDGSELIDMVDDIGGYSFSMNTTGPDSILRLPGDGKLNVPSLPEGLGYQRYYKTGPHVGLSRPTIHKIATSTFNAVSTRLHGIVKLRTEDFTDDEYLAKLSTMFVKDWQDRLRQFSEEPIGLSYDDMIQWLVNKGHKVELLHGMIDDTKYMDGAIDPQRAQAHFKVENLLKEEVNDIMDQTGRIIVWNNQNVNMYLCPMINECKKRLITLLNEDLVSYADGMTMVDINDKLSRIPRSKYLVELDLSKQDRQTDRAILDFEWNLLALLGLDGRVVHYLRKVGDGFKYRTPEGITATRPALHWSGGPMTSLGNEIRNLLLLADLVVNKDIKHILTLGDDSLIFSDTEFDSAQVSLIAAQRHNVGCTFSQSYDTGLFLQLIIGWVGDKYVASHNFFRLREKMAYSSYPSWSASWKAKYASFLMMIGDSDAVRARLSKMGYTAMPALGSDISSRIQLNARHNKTTEDHVLSVVSDIINLAFADCEEIKLPLTMVLPRNKLTHGEVILREYKEVTIDIVDRLNAVMEQMI

SEQ ID NO: 1391 - protein, 1293 aa, Soybean leaf-associated endornavirus 1
MEEKEPTGKLAEISTLPEDLEEKPAVVCEESNEMGDYVIDQSLGKEEDKDIRDHDVDVTSSKHIVPGVETNPEHVSLMYKIEYVVDNIVRQRPLSDDGNLKFIRESGHFVTDTPTNINYTLNEAHKDGSGCGLNSIMTNLLRYGRQLNKDKMIELTGRVTAHTVSDIAMCCMLNRANLLMVSKSNSTHWYIFDKSWITVQILQMVVKGVGHAEPAELDYAELSNLWKSKRKFDDVINVKKIVVSPTCSRIGMPVMANSYITTNCLDHIHLKNYDQIISRQCVQLRSDGGRLKLEDKWGELLYRLTNKSISHWNARVSLLNVSKVISRHRNPIKVIHGVKYQNGVVLNEKHSDTIRGGTLILIIGMYGAVTTIACPIKEGIWLPLECNRLEPLFFLSLGTGIYAERVMEKKVILKTEKEVRTFLNNASLNRCHAFGMFTDVTSTQSAEATHLIVSQFDDRPHHMYNERDILTKYSDDHIIYVGTDLTSDAITWIRTSGKHHRRSLISGRMAIEVQTRDELLQAILNVLPPSWQREIVVTGLDGGASTINYVGFHNESHMTAGAWTGFSDILGKMLQNTEGSNDNVEIKSVNWEGTKTVNKVVEHLTSLQLTASSDLTWNLVAGKMNDSRYVITVVDSPSVVIERLKNLPKFKTVSPMLAMADGSVLVVPCGLILELDHVTGGQSYFHDNTKHDHNPGNDAQQEETGKVREHWDMKDQTSKSAGQIMGAHDWWNINKSKTTDTNQQLQQLESLQNIEGLGDLEILPLQNFNMQVNEGSYWDSKIYFEYKEDGQTLTSCDMKLDEDITSEVIEFWLEDDLTDHNVIYGPRATMTMSHDGTYGAVKSVKKTTLVRYPIYSRPVMTKMANQEINAVTGRIGSVTEVRKFSIDPKIEGRQFAETYFKSDWGAMVHHYRQNPLTFDSEKTLAWISTRSDSLKIAKELQEMLDEGLVVHGLDRVNVHLKLESLLKDEPITSYREQQARTIVWQSKAICAIFSPIFIEAKKRFKTILHEKFIYSDGLTPSQINDILATRPAPKFFLEDDLTKQDRQTDQQLLDCEFEIYRYLGVSEMVLSSWRSVHNKWRFKGKTVKGLFDAQRLTGQVTTALGNVIVNLLVHRRLVQVNQSSIQTMLVLGDDNLLFMSKFIDAKELRRTIADYYNMQSKAFNYENHGTFCSLVAYRSINGVAQLGPDYVRLRRRFEVTNGVSEVTDVNLEMRSMSYCTMLGDIPEARQIVQDKQWGLTLPNWYAQDMLLPALCNKYNMSLELVIANLQQLLNMIRTPKVYHHSVDVLVENR

SEQ ID NO: 1392 - protein, 1028 aa, Staurastrum sebaldi endornavirus
LMNDVVEFFTFCNNRKHLIIVIQQSNVQKHACLGAIKKLHNEVVYTKQIKEVSISNLLSILDCKVNSLEELSNVNNWKRLFGKSWHDNLVARINSRNVEIVNQRRSENTYTIRAWCDDVISNAMVNESNVSPRVCVILTDNVWKVGLYLIQENLMVITSGAFTRNVITVMDVGIRMPIKPVPKKQIMTLTDNLKLSYVLNTESLTYMLLKTSITYRVMSPTVEAVNKLYVCCYDNRSHHWGSYKDYFKLADEVIISEHVKTESILKVLEETYDKPTRKVLHNCELMNAIECHNIAVMSHLEQTLISKNINYHKTGDTIKSYQEIDKYLETDNLHQTGPAWFHKKASKECVITTGDLTRLDPTNSGIIAQIIKPKDLVECRLKPFEMHQQQSYLNTGLVTGTVNGKKCVSSISSGYVFTIPSVGGKVTQQSMLMLEQQQYNMDRVVWRDVKDRNTKDWWQLQKVQNKDFVVEPMQDVQAFTMLVIEDNNFDIIGETEMTDNMLKDTEVSSLKIEPYIAPYTQNFTADDLEPLYDMPDLATRNLWDNPDLTDWLTMYAPENACKIRSKELPQRIIKSYKTTLTKYPIRARPVLTKMVFEEGRSIVGRLKSVQVIRKQTPNPRDLLNEFVDVYFTAGSKLTAAKWRQDPLTFNGHDVAAWIEAAKGGPKVLTEAIEMLSGEILCKPLNDVNIHLKLESLLKEGKEAIHNWRQQQARIIVWQRKAVTALYARMFNEIKSRLKQCLKPKFEYVDGLRPDEISSKARLLKNVKGFFENDLTKQDRQTDDPIIEVEMCIYAWLGLSPIVLSSWYYMHKTWRFKSTHYRGYGESMRLTGQATTALGNAITNMQVHCRFVKENYNNIGLMFFLGDDMIGLMTEVPDIKGLRGYIASRFNMQSKDNFNKNFGGFCSMIAYKTHQGTCEFGPDIVRLKFRYEVTNGVHLSTQDNLLMRTASYLCMLGKNPHTDLIIKKLNLPIKPVHWYSESECITAASYKYDMTPQQVEGYRDVLLKMMENQEQTTHEFRMFTASSRW

SEQ ID NO: 1393 - protein, 1615 aa, Volvox aureus endorna-like virus
MIFHPLGGEPETLLQWCIRGTHLKSPDAKLLKQVTEEFQSMLQDMIANVEPVIDETFDLIVETPFTGVGIHLSERYKIRYVESTAFLWHPEHWPDSKEYKIISSSVVNCMMWYMKQPILDAWRISMGMKPLGLLRMPYATTTLYTFDESLQPVKHDCSVYAVGYSASRVTRNHGSVPKELEDYDLAHSFLIGFGSMNTQMCAQRIIAIVRALNNSPKLRQYFDNNAIIIIIFDITKVSGIVLKELRDTIDKPYVKIFKYMQYGSILPHVPYMIHHGGSGATHTALHCGCYSIIWPFFGDQYDWGTTLEREKLGLEIKPNGDLNPMMDSIEANMKTVNSTEIEIAYTNNISFNTLPVVYQWLKKHVLRDGAVEGCNVLLKMIPPECLPVTGDQAQEKAKELWGNHMILASPFYVAKQMFDNMFRNPTDYTKTVDIHPIFGPTFVDPISNLPFNFPTELGIYTIRAPYSEDDVEYNPETQTSCVYAVLQDFANSNGIVLRLQDVQKLVGMGSWVRESSIIPTCWALGIDIIIHKNGEFKFHNFQNSRNPVLIGIENRGDVLHAVRLSHNILYKLHNWIKSNVGTSMQQLSTIIRPSMEKISDSIIGPMNDMHKTIVPLKVQNFTQFMCRLVTRKLEDKDLETVKTLNLGVSLRDIQTKLEFKNINHTIRKSRRALIYTPLITRTNGWFAEESPGQFYRMYLVLTTTGAVPCLLVPLTGNSGFLWSFTACPYPLSLNIILPTPICMRSLTQPTPPKPIIIAPDKLFKKITALTNDCARYYYDKYHTNIKVKDETCDELYIATYDNRVHHQYDDGEFLKAWIGKNKPIKWSGKIPTKENIETMMSRNTLYRLTYDNEVVPVVECGDEISAAMLYQSCIADKAYKPNANIVTLKMQEIIADPLEVSEYIERHFEQLDPVNGKFKFGSIYDGPDTVVGKQSEVQDRLFMNDPHGRNFFVLLGLNSETEYTYKVRPLTSTEILQFPRTAGYALLDYFTATGTYVTRNKTAWIRLGPCEVSVVLAAGGSREDTPFWYRDDTVSNEALKRSRWWGNMLPDSKTKIDIEGNWKKIEHRNFGVDAMELIKLHDVGEGHIAHTYGLPNIKSELMMIEGYSDASVNSVADITAQRDDVTVQTMHFWDHTDLLEWNTKVMPLNPKFKIKHKSFINGIGEQTRYTIQQYPDCARQLIIKVANAELNTTAKRLGSSLVLRKHPTEPDVEVRRVAKAFFKRDWQDISNKFKQNPITYNDDDIKLWLRERPDCIKIADELQQFLEEGFQTNPLNRVKLHMKMESLLKDEPNNHPYTQDPRLIVWQQKAIAAIYSPIFLKAKERLKQILAHHVIYADGLTPIELGRRIRMVHNNVRFFEDDLSKQDRQTDRDIIDVEMKLYEILGIAPHVISAWREVHEKWRYRGKTITGNWDQLRLSGQATTAIGNFLTSLIIHSRITASNEENIILILGLGDDILMLVIGYMDITQHVQITRDFYNMEAKPFFNDHHGSFCSMIVYKTDSGYCEIGPDVVRLRRRYEVPNSAAKPTDESLSTRAMSYCMMLGATPEVLDLVTKKHWPIAPEPWYDMQNNQNALARKYGMSLPQIQNEYKCLLDMMDNPQITSRQYTFFTEGN

SEQ ID NO: 1394 - DNA, 3439 bp, Spinach latent virus
  source 1..3439: mol_type = other DNA
gtggtattgtgcattattattttaacgcacaacccggattaatcaggttttctgagtatatacccgttagtactcaatggatacaattgttcaaatgaaagtattgtgttacgagtcgatgatattattaatgataccttcagacgtaaacgcaccaaggccggaaactgccattggtaggttgatttccgatgccgctgtttcaggtgttttgcgacaatgcgatttcactgcagcggaagcctctcaatgttttgttccaattatcaccggaagatcagaatgcattgagacgcgattttctggaagagaaatacagtttcgcaatttttcgtattcctcacaatcattcgctgctgcgcatcgagtgtgtgaagcggattatatttatagtcgattccagacgagaaataccacgatcattgatattggaggaaatttttgcacccatagtaaaatgggtagagataatgttcattcatgttgcccgatattggacgttcgtgatggagctcggtatactgacaggttcatgtctgtggcgggggctttggaaacccagcctgaccgtgagctcagactgaactattgttccaataaatttgaagattgtgatgtttccgcaccatgggcgatggcgattcactcgatttcagatataccgatcacaagtgttgttaagcattgtttccgcagaggggtcaagaaattgatagcctctgtgatgatggatcccatgatgcttgttgcttctcaaggttttatgcccagattgaatgttcaatgggaaattgaacctgatgaggagaacaaaggttcccggcgaatttcttttcatttcgtcgatgctcctggattgtcatatactcataactatgacgtgcttatgcagtacatgacttgtaatcaagtcataatcagtgggaaagccgcgtatcgagttgagcgcgttgcagatctgtctggtgtttttattgttgagattaaccctggcggcaactgctggaatgaaagactggatctagttcccatgcgagatgtttcatgcgcgtggatgacttcgttaaaacgtaagaccttagtgcgggttgccatcccgcaatatattcattcatgggaagttaagtatgtgattgccgacactgattttgttagaagagttgctgaagtgtcgttccgtcagtataaaccagaaacaccattacaggatttggtgaaatctgttgcgacgatgatttcctctgcttctaaccattgcattatcaatggtgtcaccatgcaaactggtacaccgttggccattgaggactatgtcccaatggcggtgacttttgttgccttcgctaaatcaagatatgattcgataaaggaaggcatgaaaatggttaggcagagaggtactaatatcgcggatcctaatgatcattatgattatgagaaagatggatcggatgttaagagtttttcaaatcacataattcccatgaagaataccatcaagtctctgtttttccccatgaaagtgaagatgaatgataattctatgctcatttatagtcaaggaatcttgtcaactgttgttgatgagataaaaacactttttggatgggatgtttgggacactgacgatgcggtaatacagtctctgccctctttttataagatggaggatgtttttcaagttacgtctgaccactattgtttatcacatacattatctgtggattggtggttggagggactgtatgattcttaccatgacatgcgtgttgcgcataaaaagaaacttgatgaagaagaatctcggaagaccaaggtcgagaatgccttattgaaaattgctgaggttttggagaaacctgatgttagcgatggtcttaaagctctttcagaattgcccataatatcatcattattggagaagaagagcgaagaaatcgttacaaaacctcaatgcagggatactgaaaaaccccatattaatccctatgctgatgcaatcaaagaggcgcaggcctattacgaagagcttgaggtcgtaaatactcgcaatttgagaggtgttggtgattacctcttttggcgaaagaagtcgaactatgccagcgtttggggcgctgatgaatcgagagtggttcttgaacctatggcaaggaagttttactctcgagatagaaatgtttccatacccgagtatgagcgaggtatgacggttgatggtttcgtctccattaaatgggtggacggaaacattactgaggacacgtggaagtgtctttccaaatacgcagttgttttgctcgactcttcttgcgtgtttgatgccggttcacgtattatgccaggtctgaaaaaggcattggtaatggatgcaaatttcaaaatcgtgatcgaggatggtgtggcaggatgtgggaaaacaacatctctcctcaagcaagctaagccggattcggatttgttgttagctgccaaccgtgagactgcaaatgacgcaaaagccagcggcgttattcctaaagcgcttgaataccgagtgagaactgtggattcttacttgatgttgagaacgtggttcacagccgagagattgctcgttgatgaatgtttcttggtccatgctggcttggtctatgcagctgccaccttggcacgagtgaaggaagtaatagcttttggtgatacaaagcagattccattcgtgtctcgtataccaactgtcaaactcagacacgcgtctgttgttgggacgttgaagccaagaacaattacctacagatgccctagggacgtgacggcagtccttagtgagaaattttatggtactaaggttaagacgtttaatcttgttaaacagtctttggaattgaaaaacatagattctagtaccgaaatacctgtagaaaaggatacgctatatatagcgcatacccaagctgataaacatgctttgatgcgtttacctgggatgaatggtatagaagtgttaactactcatgaagcccaagggaaaacaagagaccatgtgatacttgtgcgtttaagtaaaactaccaatttattatattccgggaaaatgcccgatgctggtggttcgcacaatcttgttggtctgtcccggcataagaaatctttgagatattttagtgtctttgccgatgatccagacgatcaaattgcgactggaattcgctggtccaaaacattggatgagcaagagttagcagcttatagagctgctggttagtgttttatttataaaacctggttaagggtcctccgggatgtgctcagcacctagcctaagccaagtccatatgcccacctatgctgctccgggtggatgcttatacatgctatggatgcctacatttgaaataatgtagatgcctaatactctctctcagggagagagtttagatgcctccaaaggagatgc

SEQ ID NO: 1395 - DNA, 2939 bp, Spinach latent virus
  source 1..2939: mol_type = other DNA
gtattgtgcagtattattttacgcacgacccggattaatcatttttgtgagaatatacccgatagctctcaatggattcttaccacttcttatctcagttgtgtgacttgaatgttctgactcatgcgctttatgttaatcaagtgtttgagattgtggatcagtccacaactagttatatgcagatgtggctttattcccgtgttattgtcccagttttgaaatatcatctcagtggagatattatattggataaattgcacgatgtgttccttggaacctttcgttcaatgatggtgccgatgattatgttgaaccgactttcattcgtcgtgaagatgacgacgatgaaccaccaccggaaagcgtatttgccgcttgaagaaagggaaaaaattcatgctgcgacgtttcttggtcatgatcattgggcaagcgttacttcgggatcatctttttatgatgatctcgaaattctcgctgatgagaccgtgaacgatgatttgcattttgataaagaatcttccatgccagatgagtatcagatcatgtggaatgatggtacaattgattccgtttggtctagtcagtttgaatgcgaagaaccaccgaaaccgaaatttataccacgcccttctgataaggtgtgtgatccagtggttattcaagatgccgtgaacgatatattcccatttcatcatgagatggatgatcgatatttccagacgttagtggagacacaggatatttcccttgaggtttcgaagtgttggatagatgcctccaatttcagagattttgttaagggtccaaattcttatgttgagcctgtgtttcaaaccggtgccactagtaagagagtgcatactcaacgtgaggctcttttagctgtgaagaaaaggaatatgaatataccggaattgcaatccactttcgatcttgatgcggaagtcaacacgtgtttcaaacggtttctcacacacgttgttgatttgccacgattaaaaaggttgcaacctatgactggtgttgaggtggaatacttcaatcaatacttgcttgggaagaatccacctgtgaaggaatatcaaggtcccttgacattgactgcacttgataaatatatgcatatggtcaagacgattgtgaaaccagtcgaggacaattcgttgaagcatgagcgacctttgtgtgccactattacctatcataagaagggtatagtgatgcaggcctcacctcggtttttgagtgctatgtcaagattggtttatgtcttgaaatcaaaaatccatattcccagtggtaagtggcatcaacttttcacgctggatgctggaaaatccgatgccgtaaaatggtttaaagaggtggatttttcaaagtttgacaagtctcagggcgagttacatcacaaagtgcaggagaagatatttaatgctttaaagttacctcccggatttgttgagatgtggttttccgcccatgagcgatcacacattgtggacagagaagcagggattggattttccgttgattatcaacggagaacaggagatgccaatacgtatttgggtaacactttggttactttgatttgtttggctagagtgtatgatttatgcaatcccaatattacctttgtcatcgcttcgggtgatgattctttaattggaagcgtcgaagaattaccgcgcggaccaggagaatttatttacaaccctgttaattttgaagcgaaattccctcataatcaaccatttatatggctcaaagttttagtaagtgttgatcttgaggatggtggaagagaagtgatcgctgttccaaaccctgcgaagttgttaattggtatgggaagacgagactgtcaataccaagctcttgatgatttgtatcaatcatggcttgatgtgatatattattttagagatgctcgcgtgtgtgaaaaagttgctgatttgtgcgcatatagacagacgcgaagaagctctatgtatttattaagcgctctgttgagcttgcctagttgttttgctaataagaagaaatttaagtggctctgttatcgtttaagagagcaagggtgtctgaagaaggatatttatcctgtagcaaaacctataagtgcccataatataaggaaagaagattcaaatggatgcgatgttaatcaaggaacagatgattcgttctcacggaaaaagaatcgtggatgctgggagtatgtcccaaagatgttgcagactgatgtgtctgttcctgttactgataaatctttccacagtaacagaggctcgtcggtttccccaaccgattgcggtgatggagggtgctccagatccgccagctcgattggtagtaaaaataccaaacctcgccatagatttcgagctgcaggagttcaccaacccagcggtcgtgatccagaccgtataccgccgaatcatcgacgaagtgcctaaaggttggtatggtttaaagtcctggtcttcctccaattatggagacgttgtggccggactaaaaagggctgcacgagttaaagtgcatttttctataccgggttcagattgggcttataccttaaatctgtccgaagtggtatctgggttagcactccccaaattaccaattcccgagaaatatctcaggatgccgattgctatcacaatcgatgataccgtcaataaaattggcgatggttttgatgatgtaccatctccatggtacttgtatcaatgatgtgttcctttcatggaacctagtgaggggccctccggggtgtgctcagcacctagcctaagctaagtccatatgcccacctacgctgctccgggtggatgcttatacatgctatggatgcctacatttgaaataatgtagatgcctaatactctctctcagggagagagtttagatgcctccaaaggagatgc

SEQ ID NO: 1396 - DNA, 2735 bp, Olive latent virus 2 RNA 2
  source 1..2735: mol_type = other DNA
gatatttcgcactcctagtgaatcttcctagtatatccgttgaaaaaacgagagtgcaacaacaaaaactacagagttctttttttttaaaaaaaaaaaaaaatcaaagagacatggccggagtactttatgatgaggagtacgttccccaggaaccggattacttgtattgcccgtacgagtgggagggtgaagatcctacccaatgcgatgcaaatgttccgtccgtcagctaccttgtggaggctgtaaaaaaatcctttactgagggtaaccacgatatgctgatttcttgcgagtcgtaccacgccgagtgttgcgagggtcccttgatgaacaagggtttgaccctctcgacttactttatgagttatccgggcatttcattacctgcgttcggcggtggtgtgattcatgtcacttcagctcgcgtctgcatgcaagctttttatgccgtgaccccaggaaggtgtagttgttcgtgtggtacgcaattcatctatcgtgccaaaggtggaactggtctaacatttgacgccacgaacactatttctagtgcctttaagttcgaagacgggaaagtgaaatggttaacagaagacctaggcttggcattattggctggttgtttcttgaaatacgtgccaatacctcatgagattgaaattaagatcgaaagaaaggtcgagcccgtgtctgctctggatttttgggaaccagaaggattgatttctgacgtacatttcgtacatccgcaagagagagccttggctcctgagcctccaatggatgtagagatggtgagattagtccgtacggaattgtttgaacactttaatcccacccttcttctgaacgctcggtcggatttttccggtgagaaactgaaagaggttgagttgccacgagctcaatcggaacccttagtccctagggtctgtctcccgcgaggtgatgacgctttaattgatcagtttttcatagacaaggcacccgagcattttaatcgtgaacctgccacagatcaatggcaggtggaatctgatgactttactgtggatttccccacccaagtgcgattacgcgaacgggacgaagattggttcagaaggaaacccgatttcgctgtgtcgtccattcgtacaggtctcgagatgcctcgaattgctacaaagaaggaaatgttaatggcattctcgaagagaaacgttggagctcctcagatggtagaggtacctcaggagatccacgtgaagaggttggctgataggttcttccggacattcttgaaagaaggcggctgggataagggggatggtcattattgggatgattttttccatagaaagggtcgaaaggtcttttcattggagaattgttacgatgaccccttgtcctcatacttagttatgctgaagtccgctgggaaattctctctagatctgaactttccggttcgatcggtaccccaaaccattacttatcatgagaagtgggttaccgaggttttttcccccatgtttctgcaggtgatggcaagatttttctctcgtctgcaagattgggttgttgttccggctggtccgatggctgacttctcccgtgtttggcctagctttgaggggaagtgtttaacagaaattgatctgagtaaatttgataaatctcaaggtaagctgttgcatgatgtgcagagggagattttcctccgtctgggtttcccacccatttggtgtgattggtggtttaaattccacgagtcttcctatttaaatgataagaaccttggtatagctttctcagtagattaccaacgtagaacaggcaatactgccacttactttgggaacacgttggtaacaatgattatgatggccgaagtgtatgaacttgattctctccctttctgtggtttgttttcgggtgatgacaacttgatcgtgactgatcgacctcttgaaggtcgagtttcgttattcccgaacatgttcaacatggaggccaaggtgatgcgtccgggtcagaattacatgtgtagcaaatacctttgcactgtagacggtcgcgtaacccctgtccctgatccttttaagttgctgaagaaagctggtgcctcgtgtcctttggagcaccttgatgacttttacgaatcgtttctggattataccaaatacctggtgagggatgaagttagaacattaatacccaggttgatggcccacaggtatcaagtctcgatggatgaagctggagttgctcttgatcagattatgagctggcgaaagtcaaagactcaattctttaagcatttccagtacaggaaaccaatcaaggactcgctcgaggctgtgaaatccgacttcctttctgctttcggaaaagtagatgatcgaataagagtttggcgcgggcgtcgaaccaatcataagaaggaggtcgatgctttaaaggtcccattggtgagttttagggagtgatggtggctcgcctagagcggtgtgctggtttctacctaaggaaccaggagagtggagtgacttggtcatgacaagtcgagtagtactttaactacgagtcgtcgttgagacgccggtccccttccaaggggatcgagagggttttcccggtactttacccgggattcgaattgagctgtctttgacagagctcaaactcctcgctagatactctaacgagtgtcttgaggactctcctatggagagtcagtaaagacc

SEQ ID NO: 1397 - DNA, 7531 bp, Citrus yellow vein clearing virus isolate CQ
  source 1..7531: mol_type = other DNA
gaaaagcaaacattatcatacacaccccaaaaattgtgatcatcgtctctgcatcaacagctcagctaagaaccagagaaatggccactattaggggtgccatcgaacgcattacagacaccaccgtacgcactacacttcaagaggaggcatgccgccaaatacgcgctgaacttaaaaacgtcgaacacatcaaccgttacgctatacagcctgacgccgccgacgcactcgaacacctaggcattggttctaaccccttctctgtggcactgcacacacacggtgcctgcaaagcgattgagaaccaattactctatgtagttggtaccttactcccaaaagaacgtgtcaccatgctcttccttaagaaaagcaagctcaacatcatgaaacgctgccctaaattccaagacatcttcctgaaccaacatattgaaccacgcgacgtttctaggtactgcgactttaacgtccaatccacctccaccagcatacccacacgaacggcttacatcagtgacacactccactttatggaccgtagagacctagtccgactattcctaaacagcccaaatctagagactctctacgccaccattgttctcccagtcgaggctgcttacaaacaaccgagccgctacccagagatataccagattaactatgacttcgacggtttccagtacatacctggaggccatgggggcggcgcctaccaccacgagttcgaacagctgcaatggttagacactggccatatccactggcgtgggcccgactgtaaagagattcgcatgacaattaccgcccaaatgctcgaaagcttaggtgcgaatcatcttttctgcttcaaacgtgggaaactactcaccccacgtgtacgcactttcggccgagatacccaagtgctcttgcccaaaatcttccgcccggccgacaaaaactttaacagggcaataccactaaccctagctaacaaactactcctgtacgctaaatccattaacacagtgaccttccgcgacgtcgttgccaagacacgccaacttatgaaggacaaggagcttgaaacatacaccggcaacgacctgttgcatatggccaactatttcttcgctgttggagcactgtcaggagttaactcctatgaccaattgcttggcctatccgcctgggaagcctgcaccgtccgtatcaagaacaccataacaaatctctgggaaaagattgccggaaagaaagagttcggcaagctattggaggcccttgagtgggaaacattcacatactcacgtcaagtgaccgaattcaccgttacgggactgcccgccctgctccccctcccagacatctcagaccaagaagagattttcgcccagcaggacgagttagacaaaatcactgccggcgctaccaagatacggactattgacattatgcggggacaagctaaccgcgctaacccaaaaactccgatcaactcaacaccggcccagggaccccaactgcccgatacccccgacccaatcgaccaagctgcctccaaagacctcgtcaccaagcttcagaaaaacaaacgcatttacatccaagacgacgggccggaataccttatgggacacatggctgaagtccctgcctggtatcttgaacaagatgataccaccactagactcaaaaaccgctgcgcttggttcttcggcccacccacctacagatatgggcacaacgacattgagtacaccaccatagaatactacccttgggtcgagcgtattggagccattttcggcaagtacaacacctgtcttgctcaaacttacgacgccggagcccgtattggataccacgctgacgacgaagactgctacgaccccgacgtcaccgtggtcaccatcaacctcactgggaacgccaccttcctgctcaagaccccaaccggcactaggacctggaaacttaaacctggtgacttcattatcatgaaacccggtgcccaaaggtgcacaaaacatgccattagagattgcacaactaaccgcacatccttaaccttcagatggcaggcccgcacttgccccactaacctcagaaagatcactaacctacccaaagccaccaaccaaccccaaaccactgaatggcgtcctgtaactaaaccacgccctagcaccaccgcttccagcgacacccagaccccacttgtcatagaccaggaacgagggtataccaccacctccgacgtgacaccaacgattaggctgcccgccgaaaatggtaataacaccggtgctggaccctcctccgcattaaccctcgccgacctgaatgataaccaagcgccgaccactaacaaaggaaaagagaaacttgaggaaatggtcgaaactggcccaactatcatggaacgcttcctcaacaccgttcaggaaccaacacaagatttatgggactccgcctctgaatccgccgcgagctacctcgctgaaggcctcggcatctctgccatccaagcactcccttgggcacctcacttggaactcatcaatgcattaggcttccagggcactgaaaggcaatacggcccagacaactgtctcatatggcctatcacgcattacagagaattgcccagaagcaacaatgtcgaagcccctccggaagtgcttgagctgctcgactgcatcaatagataccccactgacgtcccaatgctcaaaactcgagccgccgccttcggttcagacgtcaagaatctacgcataggggcacttgttaagaaccaggacaaacagtggcgcgcatcactcgcactactttgtgaggaaaatgaacacctcctccctaccactgtaatacacggcgctggtggctccgggaaatcccacttactccaacagtgggtggcgtctactgagcgcggaaatgtagtcaccatcttgcccactatcgaactccttcgagactggcaaaacaaatgtccacatgcaccgaaagagactttcaaaaccttcgagaaagcgctcatccagaacagcgcccccgtggttatcatggacgactactctaaacttcccccagggtatattgaagcctacgtcagcctcaagggccagtgcaaacttctcatactcactggagatcctagacagagccactaccatgaggagaaccctgaggccttaatctctactcttgaccccgccacggactactttggcaaattttgcgcatacaacatcaacgccactcatagaaatgccaaaaccttcgccaatgcgcttggggtgtactctgaaaaagaaatccccaccaccatcacctgctcatcctaccagaaaagcggttggccaacacttgtcccatccatccttaaaagaactgcgctcaacgacatggggcagcgctcactaacctacgcaggctgtcagggactcaccaccccaaaagtgcagatagttcttgacaacgccacaccactatgctctgacaaggtcatgtacaccgcactatctagagcggtggaccaaattcacttcttcaacactggcccaaatcacactgattactgggaaaagatgaacgccacacctttcctcaaaactttcatcgaccacacacgtgaggagaccttcgctgagcaccaacctgccgaacccacagtgcgtgagtacgcaccagcaacgcatttcccaccggctaacgagaacctagcactagagccgtgggtcgaaccgctgactgataaacactcgcgggaactcttccactctgccttaggccacagcaactgcgtccagactgaaaacaccgtagtccaactttttccccaccaacaggccaaagacgaaacgctcttctggaaaacaatagatgccagaatcaagataaccaccccagaagagaacatcagggcttgcagcatagccactgacattggcgacatcttgttcctaaattacaaagaagccatgggtttaccacaagaccccatacccttcgaacaggcactctgggactcttgtcaagccgaggtgcaactaacctacctcagcaagcctctggctgcactcgcaaatgccgcccaaagacaagaccccgactttgactccaacaaaatccaactcttcctgaaatcacaatgggtcaagaaagtcgagaagatgggctgccttaggatcaaacccggccaaactattgcttccttcatgcaacagactgtcatgctatacggaactatggctcggtacatgcgccgcatccgcacctcactttgcccacccgaaattatgatcaactgcgagaccaacccaaaccaaatcggaacatgggtgcgtgagtattggaacttcaacacccagagccatgagaatgactttgaagcgttcgaccaatcccaagacgccaacatgttacaattcgagctcattaaggccaaataccactcaatccccgaggagatcatcgccgggtatcgacacctgaaatgcaacgcccacatcttccttgggactatatcgatcatgaggttgtctggtgaagggccgacctttgacgccaacacagagtgctccattgcatacaaccacacaaggtactttgtgccgaaaggcaccgcccagctctacgccggagacgactctgcatgcgcgtcgcccctctctgaaaaacccagcttccaacatatctcaccagagctcagcctcaagtctaaggccaagattagaacccaacagaaaggagactttgcgaccttctgtggctggctcatcactccaaaaggcctgatcaaaaaccccacccagctttacgcctcctggttattggctaagcacaacaaagatctcgcggacgtggccagaaactatgccttggacttacgcattgcctatcaacttaaagacgagctctatgagttattatcacctgaagaacttgaccaccaccaactgctcgtccgagagatgatcaagcacaaaatgggccatctcctcaacctccctgaggggtttaaaacaaactaactcgaaatggacttacctgagctcctgctatccaaaaacttcattcgcacccggttacccctcgccaaacccattgtcatacacgctgttgccggcgccggcaagacacaacttcttgaagaattcgcgcggtcctcaccctcaaccaaaatctactcacctgtgaaacatcactccaactcactgctgctctcgcccttccacaaagctctctctgaagcttccattgtcgacgagtaccctctaagccagatacacgagaacgtcgagtacatctttgctgaccccatccaataccttggtaatccaaaccttagaaaaccccactacatctgcgcgtcttcccatcgatttggccattccaccgccgctctcctaacaaaacttggcattgaaacttacgcacataaagaagataccgtccgggtagacaatatcttccaggctgaaccagacggccaaatcatcgcctgcgaccgacccactcaagagctggctgccaaacacacactagactacctgaggccctgcgaaagcataggactaactttcccacgaaccacgatcctgatctctcacgaacttactgcagacaccctcaccaaagagatttacatcggtttgacccgccactctaaccaccttctcatactcactccggatgcctctacaacctcctcctgaccacacttgggctttccgactactagctcttggcgccgccttagcactgctcactttcacgctcaaccgagacacaagtcgtcacgtcggagatccttctcactcacttccttttggagggtactacagagacggcagcaaagtagtccattataactccccgagagccacaaaacctagcaccccttccttcctgtacctggccccaatcttactgatcctactaattcatgcagtcaatagatttactaatcctcgccattcttgttcttgcactcattgccagcctattccccgcacctgaaccttgcacaattgtagtctctggcgcctcagcctccgtaactaactgcccaaaccccgaacaacttgcagagctagtcagagcgcttaaaccggctaaaccggtttaaaacttaacacaaactcgaactcatgagcttcgactacactcaccctctctaccgcagctatccatttccacactactgcgagttcgaccggcaccaactctgcgaccatcatccagtactcaaacctccaactcacaaacccagcgccccgaactctctcatgtctaccaacgacaacaagggcaaagaaccacttcacccgacaccttcgggccctaacgacacgaccccgaaacctatccccgtacccactccctcagttacgcccacagctgcaggtaaggaaaaccaagaacccatcgaaaagcgtatcacacacgctttccacgctgaagcaaaaacccacaacaatggggtctctccacctgcctttaacccgaacaacatgaatgctgtgccgctgaacctgctcaacctcaacctaagatactcaccggtcactaactccatagctaaccctaaacagactgaggctatcgggaaagcttgggtccgcatcttgaacatcgatcctgccaacgtgttcttatacgccatcgacctcgccagagcttgcgccgacgcgggctcttcccctgaagctgatattattggagcgaacgaagatctcaaccccgttgttgaacgaaacgcattggccctagtggttagggatttctgcccgctgcgcgctttttgcgcttactactctcgggtggtatggaacctcatgatcaaggcggaccagcctccggccaactggatgaaatccggggtagacgagaacgcgaaattcgcggcattcgacttcttccatggtatcctctcgcccgcttccctgtatgtgcccctagagagacaccctacttccgcggagaggatcgcaaatcaggccatgttcgctgtgaaaattgccaacgctccaggaaatggcacggacctcacgatggaccacgttgccttcaccaaaggaaggactacccagcactccggcctccgcccgacccctttcaacatctaaccacctttgaaccaatactcctagcatgcctacaagcccttaaaccacttccccccgaaatccaaatagctatcatttcgtgtgtgtgtgacttctttaatttcttacgctgtgccagtagcaagtaccagggcaccagccgctcagctgttaaacgtcgagcggcccgcctgaactactgctacaagtgtgggcaccccttatatctaaataaacctcacccctgccgaccaggtcaattgtgctctgcatctatctccgagcgcctctgtttgctccacacaggaccgattaggtttctaaccgaaaatcctgttagtgccagagcagctcacttcctagcgcacgagctccttgaccccagatgaaacataaatattcaggctttcagtttccattttctg

SEQ ID NO: 1398 - DNA, 7890 bp, Potato latent virus, complete genome
  source 1..7890: mol_type = other DNA
tcggataaaccaaaccaacaatatttacacatactcaagttaaacatacactgttcaatcttgcgtacgttattatggctttgacttacagaagtccattggaagatattgttggtgcatttgaaccaagtgttcaaacagctattgcgaacacagctgctaaccactacaagcagcttgaggaagagaagggaatcttatttaattatgcattgccacctgaggccaaacagaggttaataggcgctggcatatatttaagtcccttttccgctgttccacattcgcatcctgtgtgtaaaattttagaaaatcatctgttgtatgtagagcttcctagtagactagataattcttttatgtttgtaggtattaaaaactttaagttggatctgctcaagcgcagacatgcaaatctaagcatgatccaaactatcaatagatatgtttgtagtttagataaaataaggtacggttcaaatttcgtagttagatctagcgctagttatccagagctttgcagacgcaaaggtgagcttgacggagcagtgttgagggaattggtgcctgagttgatgattaaaagcgctaagaatctattcttgcacgatgagcttcattattggacccatcgggatctgattaccttcttggaggtactgaagccagacaaactgttgggcaccttagtttacccacctgaattgctaaagggtgcgaagaaaagtttgaactcttggtgctacacatatagagtggacaaagacaaattgtttttttatccagatggcgtccattctgaaggctacgagcaaccattgagtggcggttacctcctcgaaacaagtaggattaccacacgtgatggtgaagtttattgcgtcgatgttgtgtgcagtaaattcgcgcatcatttgattgcaataacccgtggtgatctgattgtacccacacaacgcagttttgctccctttgaggccataactagtaaaggtttgaataacttggtgaggggcaaggtggaatgtttccccgtatgcgcaagtgtagtgtctaaattgtataggtatttgcgcacactcaaaaaacccgatgagcaatcagcaatggccaaattgagccaacttcaggcaaatcccactggggaagagatacatttcatccagggctttgccaaattggtgataaatacaaacaaaatcgacagtttaatcaactgcgatagtattaaggtgttcatgggcaaattgtttggtccgttgcccaattggcttaccaagagattgaggagcgtgcaagaggtgtctctcgatgaatttgtccattactttgaaccatatgtcgtcaacgtgcccactaagcatgtgaactatggttttgagttcaattacgtaatggaagatttcaggtacgagcagggtgagaatgatctagtggatatgctagacaattttgatggctccacaaagatgagcacaagcctttgcatgatgaccccatacgtcggcttagcaccattgaccacgcgacgcaaattcctatgccatatcgaggagaattccatattcagagtggtgtctaggaacatcttttgtagctacacaaatagttacaaagtggccgtgagcactgagggggtggttcggatacttgagatttatagcaaagtgtctgtggatctactgggagcgtatttgggaaaattgctcaagaaaacagagttcatagagagagtgcgatcaagggttaaggcaattgccataaagcacctcaagtacacttggcaacaggttggtctagcttggttcaccagtggaaggcgtggctacacaaaatacattgattgcagcccatacacgatgaataccttcaaagagcttaaagagagatggggtgtgattgtgcgtgaattgtctaaacagcaggacaacgctgaagctgcgaaaaacatacctgagcaggaaattcaaacgaccagcaaaccaagttgtgtggagaagcgaaattacttctcgaacactttgatgactagctttgctgcgtcaggagtgaaaggcaaggaacaggtgagctccgaaattgccaagggtaggggtgaaaggagcgaattgagggcaactaaattgatgggctcatgcagcaccctcggcaaagtggctcacatagcatcaagaaaaggctccatgggggtattggaatgtgtagcgagggtcatcaaattggatttccaaaccgccttgaagttccttagagtcaagggtgtgtggatgcaggagtatgagagcataggcgagttggaggaggagcagatacagagtcctgcatatgatttttgtgctgcgatcgcaatgaccttcaatgttgaaattgaattgacgttcccaggctcagagcttgtttaccacttcgctgcaagttcaactgtgagttgtatccgcttgagcatttgggaaggcgtagtcacactgatgagggctgaaaatgattgcgttatcactgcatgtgcacaagctttagctagggagcctgaggatgtagtgaaggtgctcaaagatagattggaggagagcatactggaagagatttggaacggcgaaggggtgcctttcgagagaatgtatctcttctttgaagctctggatattcaagcacattgcaatcgcgatggtgcacagctagtgttgaatggcgggggcaagctggcgcgatgtttcgtgattaaagaagatcacatcgagttcgcaggtgagaaaaaggtcagtagagtacttgagctccaggatgctagaacaagtagtaaagcagacccagaattggtcaaggagtttcagaaagccgggactgtggtagaatatgtagcagtgcaatccagagcgcaagtcctggcgaagagtctagtggatgcaaccactggggtgtgcagctcaaccatattcaatgactgtgagagcttggaacgttcctttagattcaccgaaagcgaactagcgcgaaatgtttgttgtgttatcggtacgtttggggctgggaagagtaccctgttcaaggatatgatgaggcagtgcctagggaaaggtgttcactacgcatcacctaggaaggtgttggcgaatgagctcaaagctagtttgggtttggcaaaagggaagcggaatcgaaaagtagggacagagaattggaatgtgcacaccttcgaaagtttcctaaagaaggcgaaaaatgttgcagagggtgagttggtgatcattgatgagatccagttgtacccgcctggctacctggatcttctactttacctcatacctgagttcactagcgtcttcgcggtcggtgatccatgccaaagtgattatgacaacgagaaggataggcatgtcttcttaggggttgagacagatgtctgtaggcttctgagcggccgtgagtacgaatttaatgtactttcccgcagattccacaacttaggctttgaaagcagattgccctgcagattcaaattcccggctggagcagtcaaggaagagtatttgttcgttaattcaatgactgaggctaatgagttggacagcgcctacaaaagtgtgtaccttgtgtcatcccacttggagaagaaaatagtggagtaccagagtgacgttaaaacgccgaatgtgctgacgtttggtgagtcgactggttgcaccttcaagtatggttgcattctcatcacgcaagtgagtagcgcatgtagtgagcgcaggtggatcactgctctatcgagattttctcacaatctctgtttcatcaatgcaactggtgtgcccatagaaaatgtggcgaagagttacaaagacagaagtttgggaaaattcctgtgtggaactgctgttgagggtgatataaaatcaatggcttatgggaccccaatcttcaaagagcagttcatcgccggcgttgggcgcgatgaaggtgtcaaggaggataaagtcaccggtgatccttggttgaaaaccatgttggatttgatgcagctcccagatgttgaggaagcagagatgatgcaggaagagatgcaagaagagtggttcaaaacccatttgccacaagaggaaatagaaggggtcagatgccgctggattcacaaaatgctagctaaagaagcgagggaatgtagaatgggatcgatcgtttcagaccaattcccagatgatcatagcaagcaagaggggaagcaaatcactaatgcagctgagcgttttgaagctatatacccaagacatcgggcaaacgacacagtcacattcattatggctgtgaagaaaaggctgagattttccaggccttctgttgagaaagcgaagctcacgcaggctgaatgttatggaacttacctgctcaaaaacttcttggatgtgatcaagctcaagcccgcacatgatgaggcaatgatgatcagagcgaaggaagattttgagcagaagaaggtgagtaagagtgctgcaaccatagagaatcacagtgggaggtcatgcagagattggtgcatagatatagggcagatcttttcgaaaagtcagatatgcaccaaatgggacaacagaatgcgggtagctaaagcagcacaaacgattgtttgctttcaacatgccgtcttgtgccgctttgctccctacatgaggtacattgaaatgaagctgaaagaagtgctgccggctcggttttacattcatagtggcaaaggtttagatgagctcaactcttgggttaaagaaggtaggtttgagggagtgtgcactgagtccgattatgaggcttttgacgcttcgcaggaccagtacatcgtcgcttttgagttggcactgatgaggtaccttaggcttccaaatgacctgattgaggattacaagtacataaagactcacttgggttccaagctggggaattttgcaatcatgcgcttctctggtgaggccagcacttttctattcaacacaatggcaaacatgctcttcaccttcatgcggtatgagcttcatggcgatgagtacatttgctttgctggtgatgacatgtgttcatcaaagagattgcgaatcaagaaaacacatgaaagctttcttggaaagctgaagttgaaggctaaggtgcaacacactgagaagcccacattttgtggctggaatttatgtgctgatggaatatacaagaagccacagctggtctttgagagaatgtgcattgccaaagagctcaacaacctgcacaactgcatcgataattacgcaatcgaagtggctttcgcttacaaacttggggagctggctgttaacaggatggatgaagaggaattgggggccttttacaattgcgttaggctcataacaaaattcaggcatctgctcaaatccaatgtagtggaggtctttaagcgtaaatagttgttactttagcttaggttagctactatagatttgatatatggatgtgcttgtgaataaagctttagagtttggtttcaaaagattgagttccgtgctgaagagtccgattgtgtttcatagtgtgccgggtgccgggaaaacgaccttgataagagcgctgcttaactcagacagcagattcgagggttggacgctggccgagggagacaagcctaaccttgaaggagtggtaatcaggaaatacgttggtggagaagttggtccctttgctctattggacgaatattgcgtggaaccggaaattgccggtaaactttacgctgtattcggagatccgctgcaggtgaacaacattggtttcctaagagcaagctggattaaagtggaaactcaccgcttcgggaaagccaccgcgcaattgctaaatcaattcggttttgaagtcagttcaagcaaggcggacattttggtcattgctgatatttttgtgggtgaacctgagggaacagtggtgtattttgaagaagaggttgggtgcttactaaagcgacatagcttggaggccgtgcacattgatcttgtgaggggcgatagttttcctgtagttacatttgtcacatcggaaaattgcatgatattggataaggtgcgcagtttcaattgcttaacgagacattctgagaagttgatcatcttgtgcccaaatgccacttactcccccacctgattacaccaaagcaattttggccgcttgtatcggtttgtcattggctttgctcgtcggagtttactctcgtagcaccatacctgccgtgggagacaatttgcattcattgccgcacggcggaacatacctggacggcacaaagcgaatagtttacggcgctccaaataagctgaattctctggagggccaacgaactttatcaggtcaaccttgggccattgttatcgtgctgatagcggtaatcatattgttgagtcgattcaactccacttgcgcacactgcggtagatgtcattgaccgcaatttatttagccattggtctgctagtcttcagcgtgtctgtgtatttaattcagccaaatctgcaggattcgtgctcgatcgtgattactggggaaagtgtgcgaattctcaattgcagggtgactgaggccctacttcgatttgcactggaggcagagcccaagagcgtgaagatcccttaggtttactgggtttgatttgaatatggatcagaaaggaaaacaaagtgagagttcaagtcaagctgtggcccctgttccaaaaccaccgctgccccctccgatcaggggcgaagaggcggttaatgaaggcaatgaggaggcgaagatggagcgacgcctagctctcttgcatcagcgcttgaagggtgagcggaatggcacacgcattaccaatccgagctttgaaataggaaggcccagtctgacgaggcctgatgatatgaggagggatcccgccaacatattcagtaggttgtccatcgatgatctggcgcagatcaagccaacacctgtgtccaacaacatggctaactcggaggaaatggtcaagatcgctgtcgctgtggaagggctgggtgtacccactgaacaagttgcaaatgttgtactgcaggcggtgatttactgtgctagtgcaagtagctccgtgtatctggatccacatggtacaattgagtacacagggggagcagttgttcgtgattctgttgtagccatcatcaaaagggatgccgggttgaggagggtgtgtcggctttttgcgccgttggtctggaatcacatgttggtgcacaactcacctccctctgattgggctgctatgggcttccaatggaatgacagatttgcagccttcgactttttcgactatgttgaaaatgaagctgcgatacagccgttggatgggttgattcggaggcccacaaggtctgaaaagattgcgcacaacacacacaagcgacttgcactagacaaatcgaatagggatgaagtgttcgcaagtttggaaaccgaaatcacaggtgggaaaagaggaccagaaatcagcaggaatttccgaaatgcagccaattagccactatgaagccaagctcctagccgtgtctttagctatgtataagtttacgggacgttgtgagcccgctgttgctttaaatattgttaataaagcttgtaatgttggtatgggcaagagcagcttcgcgcgcaggcgtagggcggctctcctggggcgttgtcatagatgctttagaacttccatggccacacgttgcaatggtgtgacttgttatccgggcattggagctaagccaaaaatcgagatgttcatcaaatacggtgtaagtgagctgaaaccgtaattgagttgtgcataaaacctaattaattttaagtgtgcaactataaaataaataaagttttaaatatttttccttt

SEQ ID NO: 1399 - DNA, 6495 bp, Apple stem grooving virus
  source 1..6495: mol_type = other DNA
aaatttaacaggcttaatttccgcgctttacgtcaatggctttcacttacagaaaccccctcgaaattgcaatcaacaaacttcctagtaagcagtctgatcaactgctttccttgaccaccgacgagattgaaaagaccttagaagtgaccaaccgcttcttctctttttcaatcacaccagaagatcaagaattgttgactaagcatggtctaacacttgcacctatagggtttaagtcacactcccatccaatatccaaaatgatagaaaatcatctcctgtatatatgtgttccgagtcttttatcctcctttaagtcagttgcctttttttcacttagggaaaataaagtagacagttttcttaagatgcattcagtcttttcccatggaaaaattaaatctttggggatgtacaatgctataattgatgggaaagataaatataggtatggtgatgtagagttttcatcttttagggatagagtgattggtcttagagatcaatgccttacacgtaacaaatttccaaaagttctgtttcttcacgacgagttgcactttctaagtccatttgacatggctttcctatttgagacaatcccagaaattgatagagttgttgcaaccacagtttttccaatagaacttttattcggggacaaggtctctaaggaacccagggtttatacctacaaggtccatggctcttcattttcattttatccggatggtgttgcctctgagtgttacgaacagaatttggcaaattctaaatggcccttcacctgcagcggcatacaatgggctaacaggaaaattagggtaaccaagctacagagtctcttcgcccatcatgttttctcatttgacagggggagggcttgtaatgaatttaatcatttcgacaaacctagctgtctacttgcggaagaaatgcgccttttgaccaaaaggtttgataaagcagttattaacagaagcacagtctcttccctcagtacatacatggcttgtcttaaaactgcaaatgcggcttcagctgttgccaagctgaggcagttggagaagagggatctttacccagatgagttgaacttcgtctattcctttggagagcatttcaaaaattttgggatgagagatgactttgatgtgtcagttctacaatgggtcaaagacaaattttgccaggtcatgcctcacttcatcgccgccagtttctttgaaccaacagaatttcatttaaacatgcgcaaattgttgaatgatctggctactaaaggaatagaggttcccctttctgtgatcatcctggacaaagtcaacttcatagagaccagatttcatgccaggatgttcgacatagcacaggcaatcggggtgaacctagatttactggggaaaagatttgattatgaggctgagagtgaagagtacttttcagagaacggttacatctttatgccctctaaatcaaatccagagagaaattggattctaaattccggttcgctgaaaattgactattcaagattggtaagagccaggagatttagattgagaagagatttcctagatcccatatctaaaggaaaatcccctagaaaacaactcttcttggagtcaacgggaaacattaaatcaaatcccaatgctgaaaaaaatagcgagagcggcgaaataaagattgaaggcagtgccgaaaatgatcagccacatgaggtatcacatacttcaatggaaaccgaggatggacagggttttgaaggttcaataccagttgatttaatcaattgctttgaaccagaagaaatcaagcttccaaagagaagaaggaaaaatgattgcgtcttcaaggccatctctgcacacttggggattgactctcaagatttgttgaattttttggtaaatgaagacatatcagatgaattacttgattgcattgaagaggacaaaggactgtcacatgaaatgattgaagaagttttgatcacaaagggtctttcaatggtttatacttctgacttcaaagaaatggcagttcttaatagaaagtatggagtgaatggcaagatgtactgcacaattaaaggcaatcactgcgagctgagttccaaagagtgcttcatcagattattgaaagaaggtggtgaagcgcagatgtcaaatgaaaatctaaatgctgattccttgttcgaccttggaagatttgtgcataatagagacagggctgtcaagctagcaaaatcaatggcaagaggcacaacaggcctcctgaatgaattcgacctagaattctgcaagaacatggtgaccctttcggagttgtttcctgaaaacttttcttctgttgtcgggctaaggcttgggtttgcgggttctggtaaaacgcataaggtgcttcaatggattaattacactccaagtgtcaaaagaatgtttataagtccaaggagaatgctggcggatgaagttgaacctcaactcaagggaacggcctgtcaggtgcatacatgggagactgcacttaaaaaaatcgacggaacttttatggaagtttttgttgatgaaataggtttgtacccacctggataccttacactgctacagatgtgtgctttcagaaagattgttaagggacaaagtgaaaatttcttgaaaggcaaactgttggaattgtcaaagacttgcttaaacataagatgttttggtgatccattgcaattaaggtattactcagctgaagacaccaatctattggacaaaacacatgatattgacctcatgatcaagacgatcaagcacaaatatcttttccaagggtacaggttcggtcagtggtttcaagaactggtgaacatgcccactagagtggatgagtcgaaattctcaaggaagttctttgcagacatttcaagtgtaaaaactgaagattacggactcatcctagttgccaagagagaagataaaggtgtcttcgctggaagagttcctgtagcaacagtgagtgaatctcagggaatgaccattagcaaaagggtgttgatatgtttggaccaaaatctttttgccgggggagccaatgcagccattgttgcaataacaagatcaaaggtcggctttgactttatccttaaagggaattcattgaaagaggtacagaggatggcacaaaagacaatttggcagttcatcattgaagggaagtctattccgatggagaggatagtgaacatgaatcctggagccagcttttatgagagtcctttggatgttggaaattcatcaattcaagacaaagcttctaatgacctgttcataatgccttttataaatttggctgaggaagaagttgacccagaggaagttgttggggacgtaattcaacctgttgagtggttcaaatgtcatgtgcctgtcttcgacacagatccgacgcttgcggagatttttgataaggttgcagcaaaagaaaaaagggaattccagtctgtgctgggtctttcaaatcaatttcttgacatggaaaagaatggatgcaaaatagacatcttgccctttgcgcgacaaaatgtttttccacatcatcaagcgtctgatgatgttactttctgggcaggtgttcaaaaaagaattagaaagtcgaactggagaagggagaaatcgaagtttgaggaatttgaaagccaagggaaagaacttcttcaagaattcatctcaatgctaccgtttgaattcaaagtgaatatcaaggagattgaagatggagagaagagctttttagaaaaaagaaagctaaaatctgagaaaatgtgggcaaatcattcggagagatcagacattgactggaaacttgaccacgcctttctcttcatgaaatcacaatattgcacgaaggaagggaagatgttcaccgaagctaaagctggccaaactttggcctgtttccaacatatagtcctatttagatttggacccatgttgagagcaattgaaagtgcctttttgagaagctgtggagactcatactacatacactccgggaaaaacttcttctgcctggatagctttgtgacaaagaatgcaagtgtctttgatggattttcaattgagtcagactacacggcctttgactcatctcaggaccacgtcatattggcctttgaaatggcactgttacaatacctgggcgtgtcaaaggagtttcagctagattaccttagactgaaattaactctcggatgccgtctcggatcactagcaataatgaggttcacaggagaattttgcactttcttattcaacacatttgccaatatgctgtttactcaattgaagtacaagatagacccaaggaggcataggattttatttgctggggacgatatgtgttccttgagctctctcaaaagaaggagaggggagagagcgacaagattgatgaagagcttttccctaactgcagtagaagaggtgagaaaattcccaatgttttgtggatggtacttaagtccatatggtatcattaaatctccaaaattgctgtgggccaggatcaagatgatgagtgagagacagcttttgaaggaatgtgttgataattacctatttgaggcgatatttgcctacagattaggtgagaggctttacacaattttgaaagaagaggattttgaataccattatcttgtcataagattttttgttagaaattcaaaattgttaacagggttgagcaaaagcttgatatttgaaattggggagggcatcgggtccaaatggctatcgtcaacgtcaaccgcttcctcaaggaggtcgaatctacagacctcaaaattgatgctatctcgtcctcagagctttacaaggatgcaacctttttcaaaccagacgtgcttaattgcatcaaaaggtttgaatcaaacgtcaaggtttcctctcgatctggtgacggcctcgtcctgtctgatttcaaactgcttgatgacaccgaaattgattcaatcaggaagaaaagcaacaagtacaaatacttacactatggagtcatcctggttgggatcaaagcaatgttgccaaactttagaggcatggaagggagagtcattgtatatgatggagcctgcctggatccgaaaagaggccacatttgctcgtatcttttcaagtttgagtctgactgttgctactttggtctcaggccagagcactgtttgtctaccacagacgcaaatttggccaaaaggtttagatttcgtgtggactttgattgtccacaatatgaacaggacactgagttgtttgctcttgacattggagttgcatacagatgcgtcaactctgcaaggtttttggaaaccaaaactggcgattcaggatgggcttcacaggcaatcagcggctgtgaagcacttaaattcaatgaggaaatcaagatggccatcctggatcgcagatccccgctgtttctggaagaaggtgcaccaaacgtgcacattgaaaagagattgttcagaggtgacaaggttagaaggtcacgctcaatttccgctaaaagggggccaaactcaagggtgcaagaaaagagaggatttaggtccctctcggctagaattgaaagatttggaaaaaatgagtttggaagacgtgcttcagcaagcgaggcgccaccgggtaggagtatatctatggaagactcacatagacccggcaaaggaacttctgacggttcctccccctgaaggatttaaggaaggtgaaagctttgagggcaaagagctttaccttcttctttgcaaccattactgtaaatacttgttcggtaatattgctgtctttgggtcatctgataagacccagtttcccgctgttggatttgatacacctccggttcattataatttgacaacgaccccaaaggaaggggagactgacgaaggaaggaaggccagagcgggttcgtctggcgaaaaaacaaaaatttggaggatcgatttgtcaaatgttgttcctgaattgaaaacctttgctgccacttccaggcagaactctttgaacgaatgtacgttcagaaagctttgcgagccatttgccgatttggctcgagaatttctacatgaaaggtggtctaagggattggccaccaatatttacaagaaatggcccaaagctttcgaaaaaagtccatgggtggcctttgattttgccactggtctgaaaatgaatcgtctaacacctgatgagaaacaggtgattgatagaatgaccaaaagactttttcgtactgaaggacaaaaaggggttttcgaggcaggttcggaaagtaacctggaactggagggttaggagtcgtgtgaaattccgcaaacttggtcgcggtcttgcaggttgacatgcctgcctttatacttaattaaagggttcccccggttttctgagcatttccgggttagtgtggtttttctagagtctagagtttgtccactct

SEQ ID NO: 1400 - DNA, 8747 bp, Citrus leaf blotch virus, complete genome
  source 1..8747: mol_type = other DNA
gaaaagcaacgaaagcaacctacacaacccaaaattaatatattgcaataactgttatcactcaatataagccatggctttgatgagcaacaaaactgcaattgaatctattttgggtaactttgaaaagaaacacgtcgatgcaatctacaatgccgccgcacaaactatcctctctcactctgaatttaggaataagcattttgcttattcactcaattcttatcaaaagaagatagcctcaaaggtgggtattgaattgtatccaaatggttatttaccacattcccatccattgtcaaaaatttttgagaaccatttgctttttgatgtacttcctggcgtagtaaatactagtagattagttatgtgtagcataaaggagtccaaagttctggtttttaaagggattcgcgacaaatccagaagacaggtttcagacctcaatgccctcaattccttaaataatagtcatacatcattcattaataggttagttgcatccaaagatgtgagtagatatacggaagaagctgatgctttttttcaatccaagaaagggagtccggagctattttcaaggaatttcatcaaaagcttggaaaataaagaggctgttttttttcatgatgaagttcatcactggactaaggcccaaatgttctcatttcttaaaagcacgaaggtcaaaaggttcattttcactgtagtctatccaccagaaattctcaaaaaatttgccaattcccagaacccaaaggtttatgatttcaaagttgataagggtcggctttttttttttccggatggggttaagacagaggcctatgagcagaaattgaatatggagtggctcttttcagcatcacatcttcgcagtggagactgtgtatggactgtaacaagacataagagtatttatgctcatcacctgtttgagatatccattggcgaactagtcacggactcaaaactttttttttccgattataactccattgacatgtctaaaatatttcttgatcgttttcggagttatgaggtattccccatttcgattgagcacctttataaggtctactcttatctgctttgcctcaaaaaacctgacttggagagtggtctagctaaattaaggcaaattattggagatgatgtcgaaatcaaagaattcctcttctttgaacaattttgtaagcgcttaattgaacgccaaacctcttgggggctatttgggcactctttctttgaaaaattaaccgatatggcattgtcatccttgcccaactctatagcccgaatttttcctcaatggaaaaaaaaaaacacatttgagttccttttctcacttgggactcttgttgtggatgtggagagaaaggtgtgttttgaacatgtgcttgaggaatggggatttgaagttgttatcactgatgaaaatgcctatcttgatccactatctatctttgctatcaatgaaaattttaatgaggatagagtggacgatggttatttggaaagaatccgtcttcccttctggaatctgaatgactatgacttgaaaagaaagagggtaaatgcgtataacattctctcttatcgatttgaagaggagcgaaaaattgaatcagcgcaaaaaggtccaaataagatgctccagattgagtggtacgggattaaagaatttaaagttgacccttttatcagcaactccataactgaatttactcttttagaagcattgctgggaaagaggatagatccaaaaaaatactcatattcaaagcaagcctgcactctttccaactatctcacatttttgtgtgctgagggtttggatggattcaatttggaagagcaccttgaacgaaggttgaaagcggccggtcatgacgtttcagatgacgaggaggaagaattgacttcagctgaacaagcggggcctatcaagatattggctgatccacttggttttatgaaagagtgtttggaggagatcccaatcgaaactgaaccatcactggaagaaagagggcagttttccactgattatcattctgagaaatttgaaatcaattacaatgacatttttaatcctcacaattgcatgaacactcacggcgatgaaattcccacaccgtcagatggcaattgttttttttcagcatttactgaaacttttgaagttgaaagacctgacaccttgaggtctgatttctcagactggcttatggaatttaatggggggtcctatgcttcacttgcagaaatgatcagaccgaatggagtttttatggaggcagaactcatatacttgttttgtgtatttagaggagtcacgttgattattcatgatagaactcatgaaaaagagaatgtttatgctgtacaccgcgggtttgaggagggccatatggtacatagaggcaatcattttgtcgggattgaaacttacaatattagtactttaacctcagaccccttacttggtgacatcccatgcggtttttcagaggaaattacaaaattccattttcggcctgatcatttcaactgtgcccagttcagaggaaggaaggcggcttttatcaccaaagttgatgcagattacgggcacaacggtatggtttacccccacaattcatgggtaccttctttagaagagatcattcagatctgtggtcagggagatgatttcaattgtgcattaataaatttctatgaggcaaactcatctcttgggttccatagggataatgaacgggtgtacaatgatgatcctattttgaccgtctgcacattcggtgaaggtagattcaccattgaatttaaggatcaggtaacttcttttctaatgactgctggctctttctttttaatgcctaaagggttccagaagaaggcaagacactctgtctcaaatgaaatgtcgagagtctcgattactttcaggaagcatgttagaaggttgaatgggtcaccgattgccatcagggaagaaaattacaaaaatacatgcctcattaatgccttttcaaaagcaatgaaaaggagcaaacaggcaatcattgcaaaactgaagactgttaatagccctttctggagtagatacctatctgagggtaacggtggctccattgaagattgtcaatcggcctgtgaggcactggatgttactgtcgaccttaatgtaaatggaaaatgtgtggttcttggaaaaggggctttaagaatctcaatggctttaagaaacaaccatttttcagttatcaatgctgcacaactgatggagaggacttttgttagccacttgcttgaaaaaggaaatgtcaatgtgttagaaggatttgacgcaatgctaagtggtgatgtgggcgcagcaggtgttaacaaaattcaatttgcagccaattttgaatttgctagaattttggcaaattcatttctaaatatgacaactggcatctgcctgggcaaggcattggataatggggaaaagtattttctccacattttgaaagatagagtgaaacagattggtatagacgtcacaatggtgtgcggatttgctggatcggggaaaagtcgcaaactgcagtcctggctgcattcaaggaaaaaagggaacttctgtgtggtttccccaagaacaaacttagccgctgactgggcattcaagttagaattagagcccaatgaacagagaaaggtttcaacatttgaaaaattcatcaaaactgataaaagcaaattagatctcatagttattgatgaattgacattgtttccaaatggttacctggatctcctcgtgtatgaattggctgatgtcaataggcattgtcaaatcatccttctgtttgatccattgcaagcaagataccacaacaaaatggatgaatcaatcctgacatttgaacatgacgtggacaggcttattggtggacagaacattgagtacatttacagcacgcatcggatgtccagatacttcaatagattttttgatgtaccttgcttcaatcaggctgatagaacagaggaacaaaggttgtggatatttgatgacgtttactccataccatccatttgctccgaccgtcaggaaccatgtgatgttcttttggttgaatctgaccttgaaaagaaggcattttcacccatcataaatgttatgacatttggtgaatcccagggactcacatttaatcatgtttgtattttgctgtcagagtccagtgcagcttcaaacgaatttagatggatggtggcgctgacgagagcaaggaccaggttttcactctgttcaaccttcttaggtggaattgaagaatttaaagtcaaaaggaaggaaagtctcatcacatccatactccaaggcgagaagatcacattcaacagattaaatctgatgctgaaatgcaatttaattaggagagaaaaagaaaatgggtgcagagatgaggtcgatagggaggaaaggttggagggtgaccctttcctcaaaccatttatcttcttgggacaaagagttgagaaggatgaagatgaggtagaagaagtgaagatcagggaaccaacctgtcaaactcatctgtatataacagagcctaattttggtttgtgctacaatttcgacttcattagggaaaaagaacagcgggaatacagagaggatatgcttgtaactaaccaattctgtgacagttatgataaggttcatataaacggcaaaagagaaacccctggtcccctgcgattcaaagcgatttatccaaagcactcagccgatgatgacatgacgttctggatggccgtcagaaaaaggcttgtatttagagaagaggaggagaattatcaaaggttgtcaagggcgcatttagttgggggtttgctatacaccaacttcaaaaaaaaaatgggcctggaatttacgtttgaccaaggtctactggaggaaagcataaatgcatttgaaaagaaaaagctggaaaaatcatgtggcacaattaaatctcatagcataaggtcggacattgattgggcgctgaatgatgtatttcttttcatgaaaagccagttatgcaccaagtacgaaaaacaatttgttgatgctaaagcgggtcaaactcttgcctgttttcagcacctgattttggtacagttcgctccatggtgtagatacctagaaacccagatcagaaatcagttgcctgaagaaatttacattcactcaaataaaaattttgatgatttgaatgcatgggtcaaaaaatttttccagagggatatctgtgttgagtctgattatgaagcatttgatgcaagccaggatgaatacatattatccttcgagattcatctgatgaaagatgcgcattttccgcagaaaatcattgatgcatacatagaccttaaatgcaaattgggatgcaaattgggccatttttcaataatgagatttacaggggaattttgcaccttcctattcaacacactggccaatatggcattcactatgtgtagatacgaatggaggagaggacaaccaattgcattcgcaggagatgatatgtgtgcattaaacaatttggctgtttgtcatgatttcgatgacctttttgaactcatcagcctaaaagctaaggtggaaaggacagaaaccccaatgttttgtggatggagactaactccatatgggattgtgaaggagcctgaattagtctataatcgctttcaagtggccattgaagagggaaaggtcttggagtgtctggaaaattatgcaatcgaggtttcttatgcctacagtttaagtgagaggctgtatgaagttttgaaaagtgaaaggcaagttcagtatcatcaagctgtggttagatttatagtcacgcacattgacaaactcaaaacaaaagtgagggaccttttcttagaacaatcttccgacgaagatatctgatggcatccctgatcaatgtaagttcacttgtaaatagggtgaagttggatcaaagtataataggtagtgatgaaataaacaaactgtatggttccgatgcaccattggtgttcaaagatgaagttaaaatggttattcctgggaatgctgagggtgaggcaatcaaattgcaagcaaatattctgaccgctgacagattgcagtcaataagaaatgcaaaagtcaatggcaaagaagcggcttatctgcatttgggatttgttccaattgcaattagatctctattaccttctggaaatgaacagatctggggtagatgcgcactggtagatactagcagaactcgagccgaaacagctgttattgatgaatttgaattcaagttcacaaagaaacagccatttgctgcaaaactactaaccatcaacgctgcagtggatattaattgcaaagtgagtgtcggtagcattcaggtgctgctggagctccatggtgttgatctgagggaagaacgttctgtagcagcaatcatcactggcttaacatgcactcccaccaacaaaatggtgttgctgcataagatagagtgcgacacgcccaaatggtctttgtgcaatataatagagcaggttgaggatgaggaagaatccaagaaggcatttgaaaacatgtttaatgcatcttcttccaacttgatcgacttgggtcaagaacagtggctcgacgaaggtaagcgaacacctttgattggcagcttggcaattaaagggtttggacgcaaagtgatgcctgttcgcagacgaaacctcaccacgagaaatctcatgaaggattatgtgtctcatgttaagtcagagacggcttcactgaaaagaagtcaaagtggaagagattggggtaatgatagattgagaaaatatctagaagagcaggctctggagcaggccagatcatcgactgatcatcagttggttaaagcaccaaaatttaaaaccatcgaagtgactggtttggaaactgtgcatgatctaaaagataaaattgacaaggcagagtcttcaactgccagtgacactggaaccaagtgagtataacgtgtgactagtgtaaatagttagtacttatttgaattaatatagatagtgtacatccatgaaaatcaccaatgataatgccgcaactatcaactattggttagccatagttgaaccattcctcacatctgatgaggacagaaattctgatgacatcattcgaaaattcagagctgtagtggccgagcatggagacacagaggaggtggaccctgaggtcttcttcgccattttttccatcttggccacaaagtacggcagagtttattcaaaaaaagttgaagaattgaatgagtcactcaaagctgcaattttggctggggcagaagcagaagatctgagaaacaagttgaaagacatttcccaaagatatgcatcacagcttgagatcacagcagatagagagcagcagcttgaaagtttgaaaaaaaaagggcatgagcaaccactgaccggcagtggatcttctgaaccggtacatgctgaatcagcacacgctccacagttgcatgtggtgaatgatctgcaacaattctacataccattcaatgaatacccaagtctaactcagtcaataggtacttctgacattgcaaatgatgagcacctcaaaagagtgcaacttacgcttaagattacagacacgaaggtcttttcaagaactggatttgaatttgcgataagttgtggatcaagaagtacgtcagacaaggacccatatgatggtataatcaagatcagcggaaaaagtcatatgaggaaagatatagcatatgcaataagaacttcgggaatcactgtgaggcaattctgtgcagcctttgcgaatctatattggaatttcaatttggccagaaatactcctcctgaaaactggaggaagaaggggttcacagagggaacaaagtttgcagcttttgactttttctatgcagtaggtagcaatgcagcaattccaactgaagctgatgggagcgttagactgataaggcctccaacaaatgaagaaaatgaggctaactctgctatgaggtatgctgacatatacgagcaaaattcaaaaacagctggacatgtaacttcaagtccactgtacaatcgtgggagcagttatgagagcaaaaacaaagcaaaactcttagaaatgtagtcccgaattctggcatgggcggatgggtgggccaggactttacactcttaaagtataagtaaggggtaactcagccgcacgggtgaagattgtgcggagcctcatgaatctgaatccaagatgctaaaggggataccgcgatctgaggggtcatgggggttagcctgaagaacagaacactcattaagtatgtggtgacgcaggtcccgacaacccaaaaaggtgagctgaacctgatccaattggagcagtacaggtaaagttatatcctttctataaattgaaaggtagtttggacagatacatgtcattcaattggtgtggaacgttagtccaaatgaaacatttatgcttggatggaaagtcaagcaaacgttgtcaatgtgtacgtgaaattgtcaaataaacctcagcaatttctatgccctctttgtgctgagtattgtagagggtgaaggtgtgttttccattttatacgtcaataaaataaaatatgtattacttaaatacacatagggatgtcttttaagaacttttagac

SEQ ID NO: 1401 - DNA, 6812 bp, Apple latent spherical virus segment 1
  source 1..6812: mol_type = other DNA
tccgttttagagcttgtgagttgttattacgttttgttgtttgaatctctgttttgttactctgatttccttcacgtttgcaccttacactctctaccgataaacattatcatcttttattttgaattttatttgaaaaatttttatattttcaatgtcaatcactactcctgtagtgattcgctttgggagttttgactcccctgctgcggcacagattgccgatactaaggaggaggaaactcctctctctcgccttgcagctttaaatcgcaaggctcaaattgctgctcgttcaagagtagcagctgctgcggcacagtatgccgaagagcaggagacactagttctcactgctcaatccatgagggatgctctccctttatggatgaggggtcttgttgcccccgctcccaaatccaaacgcgctctcaacgcgaggcgcgccgtaaggcgtgggaagcctctgaggaggctgcctgggttcgtgactacggtcgtgaacccacttcccctctctctgtttgggagggcactcctgagctccttgctatggagcatgcttaccttgccaagcaaggtgataagcgcatctgcgctcatttgcgcagacaggctctgcgggctgcctacaaagcccgatgtcaaaagagggcctttaaggtcttccaggaagaatgtgaattcttccgtctccctgtccacattgtggacaaaatccaaatcccagggcaggctagccccgtgccagagagcgtatctctgggtggcggtgttaaaaccgctacttctaagcgccaagtgaaaactcggcgctctttctcttctttcctcccaaaggaggaattttcctttgtgttgggcccttgcccaacatcttcccctgaggttactccaacctcaaccccttcaaccacccccccttcttctccacgggcatcttcgcccagaacccccttgcctcaggttaaagaggtgaccacacagggtattactctgtgttctcatgggcctgcttgtcaggaacatttttgttttggttttctagatctcaaagatgagtttcatgcttccacttatttaaagtggatgcttggaacccaactacctgggtctattttttgttttgacctccaagtttctagttatctagagcactgtacagatacaatggaggctattgatctgtggtggcatgttatggatcgttatgtgcgtaattacagagctaccaaatatgtcactaaagacaattacttaacaaaggctagcattgctattgatactgctcctaaagagtttatcaataagtgtaaattgttgaccaagcgtgcgaagcatcgaaatttgtcaaagaaagaatcttatcttcttaaaagaaatgaaagagattctaaatattgggatgcttttatagccttacgtactaatactaaagaaggtcaaggacctatagattgggtgaaggctggttatcgtaaatgtaaagaatactatgataacaccttctccaaatttgtaaatcaaattatgcaatcccttaatcctctaactatgatcctaggaccgtttaagtctgctttttgggaatgcgtttcaaatctcaaagataaatgtgttggtatgataaacgatcattggcttgcttttgcagcaggttcaacacttgttttgaccctcatatttctttttgcgatgatttgcatttgtaaagtttttgtatatttactatctactctaggtatagttgggtgtacagttacttttcttgtaacttctttaatagttattttctttttatttaatggttttctcgaacaagctgcagatattcaactttgtgagcttgttggagctgattttttaaattttttgaaccaaaatcaaaacatcgctcctattgctgccacaatggctgatattaaagaggaagctctcagagggcaagggttgcaatggtgttttacagctttgtataaattaatttctagattaattcctggtggagctaaggaagctgccatcatgtttaatagcgtaggtaatatcagtcgaagcgcaagtcatgccaaggatttctttgtaaatatgaaggaaatgactacttcttggattgacgccctctctgatgccctggctcttctaggagatgactctgtgactgctatgcacacattaaagcatctctgtgagaatgatttcttggaatgggctaagagagttgagcgctatgcaggtgatacatatgattctatgattttgaatcctgcagatcgacttaggataattagggaattagttgaccaacaagtgggctttcaaaaagccttctttaaccccagaatagcttcaaaggcacctagattgatgctcactgaatttcagcgcttatcaactatgttgagagattgccacagtgcactttctcgagctgccctctttgatatgcaaagagttcctcccttttggatacatttgtattcagagaatggcggcacaggaaagtccatggcaatgatgcctttgggtaattatttgttagattctattgaggaacctaagacccatagattcgttactaggaatgtagcctctcgatttttgaatggctaccttcaccaaccttgtttcctcatggacgagtttggtgcagctcctaagacggactatatggacgaagtcactatgttggatctcgtttctcctaaccctttaacgttgaacatggcagctcttggtgacaagaatatcatgttcacttcaaaattaattatttcaactgctaatcgtaggctagctcaccctgatgtaaaacttggggctaatttagatggctttctcagaagacgccacattttggctgaggtggtgttggctcaagggaagccatattttcatgaatttattcttttgaaagcgcgaactgagcagaaaatttatttggatcaagcattgcgagaagttgcaagccccatccatttaagtcctgctgaattttatgcagtttgcgctgagcaatttgtaaattttttaaatcaacaagggaatgctctcattgaacagcagggagtttcctatgttagatctgacgatttttcttttctcaaggattatttgcagtataagatgggtcttgattttcaacaatgtgaaatagagagaatagttactgattattctctctctattaaaaatcaaactatctttccagctgagcatgaacatattttctccagatggagggctgaattagaagcattatccttgtctgaactaattaccatgctcgataagcatgttaccgaaacttttgtatatactctaattaaagagaatcactcaaatgtggttatgtctaacctaacaccttacgagtgcttaatttattctttttgtaaagataagtataagaaagaaactgatgcaaccttctcttctcttcctgaagaggaagttaagcagccttggcttgcagaatttctttcatttacggcaaggctatgtctcaatgtgcccaaatgggtcacattggtcctagccttgtgtgctttttgccttgtaggttatgtactaattaaatttgctataggtttgtttacaggtgcttgtacaatttttagtgttttagctttttcctctttgtctgctcagggtcctgaggattctcctggattcgaaaacgctaggaaaactgctggggttaaggtgcatttcgttaaaacatccttccaaccttctgactggaaggggattaacgttaagccctctggatttaattggggggacgttgctgatgacgatgatgctatccctttgtggggtcaagggcctgatcagaatcaaaacgttctcaatcttttgaaacaccaagttgttttaatagcagagcattccaaggttgtatataatgctatagcccttggaaatagaaattttttgtttactaaacacgtttgggatctcatgccaacctgtaattatggtttattcgggtatgcgattgctaaaaataaaatatacattaatcctaatgttagaccagccattcaattaaaaaatagagatttggttgttgtacagttgcctgattctgttcctcccttctcagccttacctaaggatatttttctaagtaacttagctgaagcacctaaggttgctaacgctgctcttgttgtatcagagccattgtacgagaaacgttcagtggctcaactacaacaaaagatttacccttttgagaacctaccccaaattcatagtagagacacttactcttgtgggtctttgggctcaaagcctatgcctgcctgttattcttatacttttgatacttttgcgggcttatgcacttcacctcttatttctatggatggcggcaggtgcgttttactaggtttacatgtagctggagataaaagtaagatggggtatgcacagatagttaccctggaagacttctccgatattaacttttctgagaaggttggacaaggacccgagcaaatgtatataccaactgctcgatctgaatcctttggatcagtctgtcttcttgggaaatggactggccctaagccttattttttagagaatagttctttaactccctctctaattcatgactgtatagatatagacatgacaacggagcctgctattctttctaagaaagatcccagacttcaatacactaacaataaagattttgatccttttctctcaggtatgggaaagtatgctgttgaggctcactcctttgatgaagatgaagaattgtttgaggatgctctagatcgagttttctcagagatacctatgtttacctgtgaagatttatctaatgatcaggtatgcaatggtatagaggacgatgattatgctgaaggattggttatgcagactgctgaaggttaccccttctgcactatgcggcccccaggagtcacaggaaagacgtggctttttgcgggatcaccaggtgattggcacatagtccccaattctcttcttgctaacgaacttaatgtcaaagagttgaaccttagcaagaatatttttgaaccagtgataggtatagattttcccaaggatgagaaagttgattcttctaaagtgtacataaaacaaaaaactcgactttttactatcctacctgttgattataatattttagttaggaaatattttctttcttttgtttcacaacttatggccctccataatgaagttcctacaaaggtaggtattgatccaatttctaatgaatggtctattctttgtcattctcttcactcaaaaggaaccaattggttcaacggagattattccagatttgatggaataacacctcgtaatgtgcttcagggcattgtgaagagaatttcgcgtagatatgctaacaagagttcttttgctataacagatcctacactttctatcaatggtgatcttgctagatcccttttgatggatatgtgtagcactcgatatgggctaactaatggggacctttggtatgtcacttctggtataccttcaggatttcccttaaccgttatagttaattctttagttaattctttctttgtgcactttgcttatatgaagcttcattcttctgaagtgcacaaggctttgtatcctctttattcttttagaacccttgtatcatatgctgtttatggggatgataatctaatttctgtacatgacacaattaaagatacttttaatttagttactatatctaacttattgttggagcatggtgtgactcttaagaatggagccgataaaaatgaggaaattttatctccattctatcctatagagaaggtggattttctcaagagacgattcaccactttacaaggacatattgttgctccacttaacactgttaatataactgagcgcttgcactgggttcgtaagggcctaggtgatgctgatgccacacttgagaactgtaaatcagctctctttgaagctttatttcatggagagctgtattacaatgatcttcgaggcaaaattgaaaaagcttgtaaagtgaagggccttcctttgatagtcccagattaccaagacgctctttctttatttttaactggaggctcatatgctaaggctattcaggctatagcgatgaatctccctgatagaatctctctgtacaaatctgaattctatagtgtacaaatatatcctcaaattttttatgtgaccaatgagagaaatgtcacacttcagaaattgctggagaccactactctccgtaacatttgttatgtttctaggaactacgagtctaggagcagttctaggggtcttttcactcttaagggtgaaggttggactccagctgctttgaaagctcgtcttagtgtgtacaaagctatggccaaacctgtttacttcgtagatgaggctaatgatggtttggctatgttttattgcttagattatgcttttcgtgtttgtggtttaacccggagtcaaattgcaaaaattcttaatgcagtttttggtggtaaccccgaagtctgccaaagaattttccaatttttctctcaagtcgagccaaccaataagtacattcctcccaatcaaaggaggtaatttgtttggtctttcttccttcttttctttctttctttcttttgaactagtttgttctcgtgatccttggatccgttaaggtttcttgctggttcttccttaagatgagaacatgaaccagtctagttctttttgtttgctgtttattttatttcagtgtgtttgaaaagagtcggatagtccaatcc

SEQ ID NO: 1402 - DNA, 8170 bp, Soybean latent spherical virus isolate ND1
  source 1..8170: mol_type = other DNA
tttaatatttgcaatgtctttccattgtccaagttctacttgccttggttacactcaatctttctctcgccgtgatatgcgagagcaaggggatcgttgtccccatgctatgtgtggtgctcttctagtgaagaaggtgcccactttatccccacagggtgccagacctgtggtatcaaagaccactgttgtggtccctcctcaagccactgaggaggttttgtattatgggtgtgcccccagacccgcttttcttgaagcggttttggcggccccaaaattaaagatggctccaccagtggtggatgcgatggaagtcgcatacctccgtggtgttgcagccatggaagctgaggagaagaaactcctcaggaaagaaaaggctgcagttgtggcccgtgctaaggcacggcgagctgcaaggaaggcagccaagaagcaagttgccgagatgaaggcaactgtggccctgaaattggccacaaggcaaaaaactgcacgtttgagtgcagctaagagggccatgaaggccaaaagaaaggcagccaaggaggctgccaggttggcgcttgaagagcgccgtgctgcgggtttaacccgcaaatcggccttcaggcgtagcctgaaaaagaaagccactaagatggctggtaggaaggtccctaagacctccacttccacctttcccaaggtggaatctttttcttgttttccttcttctcccctccctgcttttattagggaggaacagccctgggtggctgtgaataccccctgccctcatcctgagggcttcgatttggcggttgatcccgcctttgtggctcctattgtggggccaatcgttagtgtgccatttatggcacctgttgtgaaggcttttaatagccttgtagaaattttggcggctatcaattatgaggccgctgtagatttaagagcctacattttagaaatagcttcttacgaaaatttctttgctttacggagaatttttgttggaaaagctttatcttggatggctcttatcctacctctttatccctatgcgggcatctttgatacttatctcccacttgatatggtggaagataagaattgtgatgcttatttagcctcattacagcagactgcagtgatggtgctggaagtgacccagggaccaatggacgcacattctatctttgatatagtgcgttccgttggttctaaggttgctagcataaaggacaaggtagtgggatgtatagttgagaaatctgctgccctgttggacactgttatagacacagcaaagggcatgttttttggagttcttggcccataccttgcccgcgcacagaagatcggagaggaaattaaaaaattctgggataactgtgtcgagtgggcaacaaaattgtggcaaggagctcatatagcattacaagctcttggcatttatgctgtttgggctatagttgctatggtgcttgtaggagtaatgtatatattagaaacaattttgatttgtttaggtgtaatgagtggtcatggtgtccttgttgttgctttgacaggggcagtcatgacttttttaggttttactgtttttcagatggggcgtgagtatatacattttttgaccgccctacgtcaaatcattttcttagcagttattccccaaggaggattgactcaagttaatatcatggattcgtccgttgatgttactgagccacactccttgttagatactgctatggcaccagttcattttttggaaactgttgccagtggtttaacattcttttcttctacctctgttacagtcttaggtaaattaggaaattctctggagggaattcgcaaaggttttaattgcctacgcgattttacttccgttttgttagaacaatttggaaatgcttttgaatacatttccggtaagagaacgtctttcttccgtgatcttgcgtgtgcagttaaagtagatatcgctcgatggacccaggatgcacgggaaaccattgagtattttgaaatttcaggttcccttgataggtatgagtattatcgtgctcgtgagcttatctatcaaggtcaagatttgatcgacaccgccaacaaagctcgtagttcgcacacaagtgtaaaattcttgcgaactattggcaagttggttgaggaactaaaagaaattcgtgctaagtgtgcacgaagtttaaaattcccaggatggcgtcgacagcctttttgggtatattgttttggtgagagtcaatgtggcaaatctactttggcaaattatttgatgccattgttgatgtctcacatgggttgggatcctcaggatgtttacagcaaggatcccgttgatggttactggtccggatattatcagcagaagggtttaaagataaatgatttatctgctgttaattccaaagatgtagcgcccctcgagcagcagttgataccattgatatccactgaggagaaaatggtgtcttcggctgaaattgaaggaaaaggaatgcagtttgcctctgaaattgtagtttcttcatccaattttaatgatgcaccaactggtgctgaaattttggatgcagatgcttacagacagagacgaaaggttttgatgcgctgcagaagggctgctgagtgggttcataatgctgatggtacgcgcacagagaagcttgatgctgagggcaaaattgtatataagccctatgatccatccaatgctttatcttgtaccgaggtgcaatggattcatcctgtttcatttacagctcttcccggaccctgtgggcagtggcacttagccgagttcaccatacctatggtgaaggaggctatggatgcccactttttgcaagaagaaacaaagatggcatcctggaagtcgagccttggcatgaagagtcaaacagcaaggaaaatgggttcatacttgcaggatatgattaagggtattggtaattttgttacccttaaaggagcaaaagattcagatcctcgttatttgctggtagctgttgatggaaaatgctatgcgttagaccagcaagggaaagccactccttatgaggattgtgatgttgttgaagaaattgagcggctaactttgttgcaataccgctcttatttcgcggacttggtaatggaacatgctgacaatacatattatcaagattcattccattcatcaacagtccgagattttttgttggctctaatgaaagatgggtcaactgttttgtctgtggatagtctgggtagtagtactcaggacattcacaaagaattatgggcagaattgggactttcagaaaagatttttctgagggtttcacaaatagctcgtaatcaattgcgcgatgctccacattttaaggaagacgttgcgcacaattttttggaaactatgaggcatcttagggatgctattgtagatagaaaggaacaaattcttttattttttgcagcagtagctttagtgggcttgtttagttggggttttttgagcctaattaaacaatttgcttgtggttctttaggatttggtgctggcatcgcattgcgtgagcaaattgctcatagtagtgttatgtcttcaggtagtgtgactagtgcctttgttgcacgcaacatgccagttgtatggggcaaagctgctaggtatgccactgcacactcaagcaaagaagaagtgggcgccaattttgattattttgaagatgctagtgctcatttgttagctcgtgttgttggctcatctggtcagtctgagacctgccttttatttggtcatcaggctattgcactttgtgcgcaccagttgagattgtttcctgacaatgacagggtgactatccattatttttcaaaggagaggcgccctgtttgtttttcatttacttggcattatattaatgctattgagtggcctgactgtgaagtaattgtatatagagatgcacagctcacgccactccctgtatatagtgatgataattatttgtgtggggagcaaacattgcccacagttttaacgataactgggctctcaattaagaagaagaaattctttgatgattccacgttgtgcccaagcgaaaaaattctggacggtgaaatgcccatcgtccggagctggaaagataccgcttctctgagaacgcaagtccagacaattttgtccgagactcatagaagagatataaataggtattatacttctagttacccatcagggaaacatgatagtggaggtataataactgcagttataaatgggaagcgtaaagtgataggcatgcactgtgcgggggcgcaaaatgggaaaatttatgttagtaccattggtcttttgcccacccgcaacattaatgatgcacactctgctgccgattattttgttccaagtattggcagggaggaaaaaggattttgcaagattggttggattgcagatccttcaaagagaccacatgctgccactaagactgcattggcaccagttcctaaggaattggctttgccattgccagagggagtgtctgtaaagattccttctattttaagtgcagcagatccacgcctgcgtgatgaggtgaatcctgaatttaaggattatgatcctctacgcgtaggtatggataaatttgccaaccccatggatccgcttgatgatgaagttttacagcgggtctgtgaagatatttatgaaacctggtatgactgtttaccaatactagatgatgagaaggtcttcttgcaaaagacctccttggaggtggcgttgaacggtataccgggtgaggcttgctatgaagccatgaggttggatacatctgagggttatccttttgttttagaaaggaaaccaggggagagcggcaaactcagttatgtacatattgatgagaatggcgttcgttcccttattcctggtacatcggtttttagagattaccatgaattgtcagcaagtatactgacccaagtgcctgtgttgaattgcattgaatgtcctaaagatgagttgctaaaaccatctaaagttttggagaaaccaggcacacggcttttcgatgtactcccctttacacataatattcttttgagggagtattttttaaatttttgtgtttttctccaacaaaatagggtgcatttgccctgttctgttggtgttaatccatattctcgcgagtggacctggctttttgataggttggctgcgaagagtgataaagctttgaattgtgattatagtaaatttgatgggcttatatcacatcaagtctacatgcacatggttgcaaccattaaccgactctttagagatggtgaggaagcaaattgtgcgcgtaagaacttgtttttaatgtttacatcacgcaggagcatctgctatgatcaggtttatatggtcaaaggtggaatgccttctggatgcgcactcactgtaattattaattcaattttgaatgaaattttagtgcgctatgtctatagaataaccgtcccaatgccagccaaaaactattttaataaatacgttgaattggtggtatatggtgatgataatttaattgccatacatgatgatgtggtctctttttttgatgggcccattattaaggaaaaattggcagaggttggggtgaccattacggatggtactgataaatcatcacccaccttgttacgcaaaccgctggagtctcttgattttttgaagaggggctttaggaaaattgaagggggaatgtattcttgccctctggataaagggtccctttactcccggttatattacagtgctggaggtaaagggggcctttttcaacttgatatcctccacgataatgttaaatctttcttggaggaactgacgcatcatgctgatcattatgaagagtttcaaagagtgcgcagtttttatattaagcgtattccttcatggtcagctacgctgcctacctatgctacatgtctgaatatgatggaggggcagcggaattcagcaacaccctggcaaccacataaatttatagaaacgcggccttcaggttgcgaaactaaaatgatggcgggccaggataatcatgctcagaagatatgtgtaactgagcgtataattatatgtggtgaaaaatatacgccaccaatactggagacctcttttgttgtttcaatagacaaccccctttatattggtgaaaggggggagtatgttaaaacagagtttggttcaggtatggggcgactgcctactgatgcctggatcaaagctttctccagtcccaagaagcacccacagctttttgaagcttataagatgggtgctactatatattttagatcctgcatgccctatttaaatgcatggtgtgcagtgtgtaagtttgcattggctcatggaatcgatcagagttctattattgctatgtatgagtcatgcaaaccaagaggggcgggcgacattgctcctcttgtggccgtaaaggcatacactaaatttgtgaacagaccagtgtttaaatttaaagagactgttcataaggaagtgctcgaagcacacaatagtgtgcgagtcgcctaaaatgagggcgcttcctttctttactagtttctttgtaaaagtaaactagtccttgggggcaggtagctccctccagcagcttggcacttgattagctttaatagtgttagctacccttcagcaaggtaggagctgcggtcgtattcgaaccgttcccgtggaactactcggggttggaagcaatggcgtatagacgctggtgtcatagttcttaaatcttatatgacactagagaggagagccatccctcttgaagcatgcaataaacaaggttgcaccatgaaactagccagcacattgaaaaatgtggcttaagggcttaataccttcgggcgttttggtggacctaacgttatgcgtgattgctgatggtactaatgtactcatgttttccattacatgataaaaggtggattcccttttcagctatgggttatggaatgatcaactcatgcaccagagtgtactaggttagtgtacaaccctctttttgctacctttttctttgcatgaataaaggagatagttcctgtgaaattcaggttcattatcatttactgctttaatttacttttatccctcatctgagtgagacagatggtacgggttgttaataaaagtgtttgggatgcactgtctgatccctcgctgctggagcgatctgagtccagccgcatttgctgcttttagatataagcagatggaggactagcactccccttgagaacaaaatcgagtgcggcctagtcgtctaggatttccttagctataggtgatcgtgggctaatgcataccacagaaacatgcttcgtctttgagctaagtgtgaccgtgatggacacttgcctgtgttctttagcacagtgtgatttccttttagtaggtgatgatgaatgtagttttgaaactatcaccgaggtctgggaatataagcgttttggcaaacgatattgccttaatctgtgtacgacacaattgatagtgtactcaagagagtagggtctggcagcctgaatcttggatgaggtcccgagatgaaaacgggggggtaattaaccccagctatcggtacacggagatttccacgtttatgtaaatgtggcgcatttgctgtttttagatataaacagatattgcaggtagaaaacctgtgtggatacctattcttggagaaggagttcgctcggaagagtactatcttgaaacatttcaaaaggaaatttcattttaaggagagtaggtaagccattatacacctgtgaggagggtacaagataaagctactgctaaatttaatgctactggaagtgattcccagggctacatgcggtgccattgtacttatacctgaagggtgagtttggaaactcctacctattgaaatggtgagaagtgtttatttagtaagctcctaatcattatagggtgacgttgttttcgcaattttgttggtctttaatccttttcaaaattgcttttgcattttaatttatgtacgactcggggaaaagaaccactgtgtgtgtgtttggattcccaatgggtagactataccaatgttagtccccc

SEQ ID NO: 1403 - DNA, 76 bp, Spinach latent virus
  source 1..76: mol_type = other DNA
gtggtattgtgcattattattttaacgcacaacccggattaatcaggttttctgagtatatacccgttagtactca

SEQ ID NO: 1404 - DNA, 71 bp, Spinach latent virus
  source 1..71: mol_type = other DNA
gtattgtgcagtattattttacgcacgacccggattaatcatttttgtgagaatatacccgatagctctca

SEQ ID NO: 1405 - DNA, 113 bp, Olive latent virus 2 RNA 2
  source 1..113: mol_type = other DNA
gatatttcgcactcctagtgaatcttcctagtatatccgttgaaaaaacgagagtgcaacaacaaaaactacagagttctttttttttaaaaaaaaaaaaaaatcaaagagac

SEQ ID NO: 1406 - DNA, 80 bp, Citrus yellow vein clearing virus isolate CQ
  source 1..80: mol_type = other DNA
gaaaagcaaacattatcatacacaccccaaaaattgtgatcatcgtctctgcatcaacagctcagctaagaaccagagaa

SEQ ID NO: 1407 - DNA, 74 bp, Potato latent virus, complete genome
  source 1..74: mol_type = other DNA
tcggataaaccaaaccaacaatatttacacatactcaagttaaacatacactgttcaatcttgcgtacgttatt

SEQ ID NO: 1408 - DNA, 35 bp, Apple stem grooving virus
  source 1..35: mol_type = other DNA
aaatttaacaggcttaatttccgcgctttacgtca

SEQ ID NO: 1409 - DNA, 73 bp, Citrus leaf blotch virus, complete genome
  source 1..73: mol_type = other DNA
gaaaagcaacgaaagcaacctacacaacccaaaattaatatattgcaataactgttatcactcaatataagcc

SEQ ID NO: 1410 - DNA, 384 bp, Apple latent spherical virus segment 1
  source 1..384: mol_type = other DNA
tccgttttagagcttgtgagttgttattacgttttgttgtttgaatctctgttttgttactctgatttccttcacgtttgcaccttacactctctaccgataaacattatcatcttttattttgaattttatttgaaaaatttttatattttcaatgtcaatcactactcctgtagtgattcgctttgggagttttgactcccctgctgcggcacagattgccgatactaaggaggaggaaactcctctctctcgccttgcagctttaaatcgcaaggctcaaattgctgctcgttcaagagtagcagctgctgcggcacagtatgccgaagagcaggagacactagttctcactgctcaatccatgagggatgctctcccttt

SEQ ID NO: 1411 - DNA, 13 bp, Soybean latent spherical virus isolate ND1
  source 1..13: mol_type = other DNA
tttaatatttgca

SEQ ID NO: 1412 - DNA, 192 bp, Spinach latent virus
  source 1..192: mol_type = other DNA
tgttttatttataaaacctggttaagggtcctccgggatgtgctcagcacctagcctaagccaagtccatatgcccacctatgctgctccgggtggatgcttatacatgctatggatgcctacatttgaaataatgtagatgcctaatactctctctcagggagagagtttagatgcctccaaaggagatgc

SEQ ID NO: 1413 - DNA, 194 bp, Spinach latent virus
  source 1..194: mol_type = other DNA
tgtgttcctttcatggaacctagtgaggggccctccggggtgtgctcagcacctagcctaagctaagtccatatgcccacctacgctgctccgggtggatgcttatacatgctatggatgcctacatttgaaataatgtagatgcctaatactctctctcagggagagagtttagatgcctccaaaggagatgc

SEQ ID NO: 1414 - DNA, 258 bp, Olive latent virus 2 RNA 2
  source 1..258: mol_type = other DNA
tggtggctcgcctagagcggtgtgctggtttctacctaaggaaccaggagagtggagtgacttggtcatgacaagtcgagtagtactttaactacgagtcgtcgttgagacgccggtccccttccaaggggatcgagagggttttcccggtactttacccgggattcgaattgagctgtctttgacagagctcaaactcctcgctagatactctaacgagtgtcttgaggactctcctatggagagtcagtaaagacc

SEQ ID NO: 1415 - DNA, 36 bp, Citrus yellow vein clearing virus isolate CQ
  source 1..36: mol_type = other DNA
aacataaatattcaggctttcagtttccattttctg

SEQ ID NO: 1416 - DNA, 76 bp, Potato latent virus, complete genome
  source 1..76: mol_type = other DNA
ttgagttgtgcataaaacctaattaattttaagtgtgcaactataaaataaataaagttttaaatatttttccttt

SEQ ID NO: 1417 - DNA, 142 bp, Apple stem grooving virus
  source 1..142: mol_type = other DNA
gagtcgtgtgaaattccgcaaacttggtcgcggtcttgcaggttgacatgcctgcctttatacttaattaaagggttcccccggttttctgagcatttccgggttagtgtggtttttctagagtctagagtttgtccactct

SEQ ID NO: 1418 - DNA, 541 bp, Citrus leaf blotch virus, complete genome
  source 1..541: mol_type = other DNA
tcccgaattctggcatgggcggatgggtgggccaggactttacactcttaaagtataagtaaggggtaactcagccgcacgggtgaagattgtgcggagcctcatgaatctgaatccaagatgctaaaggggataccgcgatctgaggggtcatgggggttagcctgaagaacagaacactcattaagtatgtggtgacgcaggtcccgacaacccaaaaaggtgagctgaacctgatccaattggagcagtacaggtaaagttatatcctttctataaattgaaaggtagtttggacagatacatgtcattcaattggtgtggaacgttagtccaaatgaaacatttatgcttggatggaaagtcaagcaaacgttgtcaatgtgtacgtgaaattgtcaaataaacctcagcaatttctatgccctctttgtgctgagtattgtagagggtgaaggtgtgttttccattttatacgtcaataaaataaaatatgtattacttaaatacacatagggatgtcttttaagaacttttagac

SEQ ID NO: 1419 - DNA, 191 bp, Apple latent spherical virus segment 1
  source 1..191: mol_type = other DNA
taatttgtttggtctttcttccttcttttctttctttctttcttttgaactagtttgttctcgtgatccttggatccgttaaggtttcttgctggttcttccttaagatgagaacatgaaccagtctagttctttttgtttgctgtttattttatttcagtgtgtttgaaaagagtcggatagtccaatcc

SEQ ID NO: 1420 - DNA, 1569 bp, Soybean latent spherical virus isolate ND1
  source 1..1569: mol_type = other DNA
aatgagggcgcttcctttctttactagtttctttgtaaaagtaaactagtccttgggggcaggtagctccctccagcagcttggcacttgattagctttaatagtgttagctacccttcagcaaggtaggagctgcggtcgtattcgaaccgttcccgtggaactactcggggttggaagcaatggcgtatagacgctggtgtcatagttcttaaatcttatatgacactagagaggagagccatccctcttgaagcatgcaataaacaaggttgcaccatgaaactagccagcacattgaaaaatgtggcttaagggcttaataccttcgggcgttttggtggacctaacgttatgcgtgattgctgatggtactaatgtactcatgttttccattacatgataaaaggtggattcccttttcagctatgggttatggaatgatcaactcatgcaccagagtgtactaggttagtgtacaaccctctttttgctacctttttctttgcatgaataaaggagatagttcctgtgaaattcaggttcattatcatttactgctttaatttacttttatccctcatctgagtgagacagatggtacgggttgttaataaaagtgtttgggatgcactgtctgatccctcgctgctggagcgatctgagtccagccgcatttgctgcttttagatataagcagatggaggactagcactccccttgagaacaaaatcgagtgcggcctagtcgtctaggatttccttagctataggtgatcgtgggctaatgcataccacagaaacatgcttcgtctttgagctaagtgtgaccgtgatggacacttgcctgtgttctttagcacagtgtgatttccttttagtaggtgatgatgaatgtagttttgaaactatcaccgaggtctgggaatataagcgttttggcaaacgatattgccttaatctgtgtacgacacaattgatagtgtactcaagagagtagggtctggcagcctgaatcttggatgaggtcccgagatgaaaacgggggggtaattaaccccagctatcggtacacggagatttccacgtttatgtaaatgtggcgcatttgctgtttttagatataaacagatattgcaggtagaaaacctgtgtggatacctattcttggagaaggagttcgctcggaagagtactatcttgaaacatttcaaaaggaaatttcattttaaggagagtaggtaagccattatacacctgtgaggagggtacaagataaagctactgctaaatttaatgctactggaagtgattcccagggctacatgcggtgccattgtacttatacctgaagggtgagtttggaaactcctacctattgaaatggtgagaagtgtttatttagtaagctcctaatcattatagggtgacgttgttttcgcaattttgttggtctttaatccttttcaaaattgcttttgcattttaatttatgtacgactcggggaaaagaaccactgtgtgtgtgtttggattcccaatgggtagactataccaatgttagtccccc

SEQ ID NO: 1421 - protein, 1056 aa, Spinach latent virus
MDTIVQMKVLCYESMILLMIPSDVNAPRPETAIGRLISDAAVSGVLRQCDFTAAEASQCFVPIITGRSECIETRFSGREIQFRNFSYSSQSFAAAHRVCEADYIYSRFQTRNTTIIDIGGNFCTHSKMGRDNVHSCCPILDVRDGARYTDRFMSVAGALETQPDRELRLNYCSNKFEDCDVSAPWAMAIHSISDIPITSVVKHCFRRGVKKLIASVMMDPMMLVASQGFMPRLNVQWEIEPDEENKGSRRISFHFVDAPGLSYTHNYDVLMQYMTCNQVIISGKAAYRVERVADLSGVFIVEINPGGNCWNERLDLVPMRDVSCAWMTSLKRKTLVRVAIPQYIHSWEVKYVIADTDFVRRVAEVSFRQYKPETPLQDLVKSVATMISSASNHCIINGVTMQTGTPLAIEDYVPMAVTFVAFAKSRYDSIKEGMKMVRQRGTNIADPNDHYDYEKDGSDVKSFSNHIIPMKNTIKSLFFPMKVKMNDNSMLIYSQGILSTVVDEIKTLFGWDVWDTDDAVIQSLPSFYKMEDVFQVTSDHYCLSHTLSVDWWLEGLYDSYHDMRVAHKKKLDEEESRKTKVENALLKIAEVLEKPDVSDGLKALSELPIISSLLEKKSEEIVTKPQCRDTEKPHINPYADAIKEAQAYYEELEVVNTRNLRGVGDYLFWRKKSNYASVWGADESRVVLEPMARKFYSRDRNVSIPEYERGMTVDGFVSIKWVDGNITEDTWKCLSKYAVVLLDSSCVFDAGSRIMPGLKKALVMDANFKIVIEDGVAGCGKTTSLLKQAKPDSDLLLAANRETANDAKASGVIPKALEYRVRTVDSYLMLRTWFTAERLLVDECFLVHAGLVYAAATLARVKEVIAFGDTKQIPFVSRIPTVKLRHASVVGTLKPRTITYRCPRDVTAVLSEKFYGTKVKTFNLVKQSLELKNIDSSTEIPVEKDTLYIAHTQADKHALMRLPGMNGIEVLTTHEAQGKTRDHVILVRLSKTTNLLYSGKMPDAGGSHNLVGLSRHKKSLRYFSVFADDPDDQIATGIRWSKTLDEQELAAYRAAG

SEQ ID NO: 1422 - protein, 797 aa, Spinach latent virus
MDSYHFLSQLCDLNVLTHALYVNQVFEIVDQSTTSYMQMWLYSRVIVPVLKYHLSGDIILDKLHDVFLGTFRSMMVPMIMLNRLSFVVKMTTMNHHRKAYLPLEEREKIHAATFLGHDHWASVTSGSSFYDDLEILADETVNDDLHFDKESSMPDEYQIMWNDGTIDSVWSSQFECEEPPKPKFIPRPSDKVCDPVVIQDAVNDIFPFHHEMDDRYFQTLVETQDISLEVSKCWIDASNFRDFVKGPNSYVEPVFQTGATSKRVHTQREALLAVKKRNMNIPELQSTFDLDAEVNTCFKRFLTHVVDLPRLKRLQPMTGVEVEYFNQYLLGKNPPVKEYQGPLTLTALDKYMHMVKTIVKPVEDNSLKHERPLCATITYHKKGIVMQASPRFLSAMSRLVYVLKSKIHIPSGKWHQLFTLDAGKSDAVKWFKEVDFSKFDKSQGELHHKVQEKIFNALKLPPGFVEMWFSAHERSHIVDREAGIGFSVDYQRRTGDANTYLGNTLVTLICLARVYDLCNPNITFVIASGDDSLIGSVEELPRGPGEFIYNPVNFEAKFPHNQPFIWLKVLVSVDLEDGGREVIAVPNPAKLLIGMGRRDCQYQALDDLYQSWLDVIYYFRDARVCEKVADLCAYRQTRRSSMYLLSALLSLPSCFANKKKFKWLCYRLREQGCLKKDIYPVAKPISAHNIRKEDSNGCDVNQGTDDSFSRKKNRGCWEYVPKMLQTDVSVPVTDKSFHSNRGSSVSPTDCGDGGCSRSASSIGSKNTKPRHRFRAAGVHQPSGRDPDRIPPNHRRSA

SEQ ID NO: 1423 - protein, 787 aa, Olive latent virus 2 RNA 2
MAGVLYDEEYVPQEPDYLYCPYEWEGEDPTQCDANVPSVSYLVEAVKKSFTEGNHDMLISCESYHAECCEGPLMNKGLTLSTYFMSYPGISLPAFGGGVIHVTSARVCMQAFYAVTPGRCSCSCGTQFIYRAKGGTGLTFDATNTISSAFKFEDGKVKWLTEDLGLALLAGCFLKYVPIPHEIEIKIERKVEPVSALDFWEPEGLISDVHFVHPQERALAPEPPMDVEMVRLVRTELFEHFNPTLLLNARSDFSGEKLKEVELPRAQSEPLVPRVCLPRGDDALIDQFFIDKAPEHFNREPATDQWQVESDDFTVDFPTQVRLRERDEDWFRRKPDFAVSSIRTGLEMPRIATKKEMLMAFSKRNVGAPQMVEVPQEIHVKRLADRFFRTFLKEGGWDKGDGHYWDDFFHRKGRKVFSLENCYDDPLSSYLVMLKSAGKFSLDLNFPVRSVPQTITYHEKWVTEVFSPMFLQVMARFFSRLQDWVVVPAGPMADFSRVWPSFEGKCLTEIDLSKFDKSQGKLLHDVQREIFLRLGFPPIWCDWWFKFHESSYLNDKNLGIAFSVDYQRRTGNTATYFGNTLVTMIMMAEVYELDSLPFCGLFSGDDNLIVTDRPLEGRVSLFPNMFNMEAKVMRPGQNYMCSKYLCTVDGRVTPVPDPFKLLKKAGASCPLEHLDDFYESFLDYTKYLVRDEVRTLIPRLMAHRYQVSMDEAGVALDQIMSWRKSKTQFFKHFQYRKPIKDSLEAVKSDFLSAFGKVDDRIRVWRGRRTNHKKEVDALKVPLVSFRE

SEQ ID NO: 1424 - protein, 1649 aa, Citrus yellow vein clearing virus isolate CQ
MATIRGAIERITDTTVRTTLQEEACRQIRAELKNVEHINRYAIQPDAADALEHLGIGSNPFSVALHTHGACKAIENQLLYVVGTLLPKERVTMLFLKKSKLNIMKRCPKFQDIFLNQHIEPRDVSRYCDFNVQSTSTSIPTRTAYISDTLHFMDRRDLVRLFLNSPNLETLYATIVLPVEAAYKQPSRYPEIYQINYDFDGFQYIPGGHGGGAYHHEFEQLQWLDTGHIHWRGPDCKEIRMTITAQMLESLGANHLFCFKRGKLLTPRVRTFGRDTQVLLPKIFRPADKNFNRAIPLTLANKLLLYAKSINTVTFRDVVAKTRQLMKDKELETYTGNDLLHMANYFFAVGALSGVNSYDQLLGLSAWEACTVRIKNTITNLWEKIAGKKEFGKLLEALEWETFTYSRQVTEFTVTGLPALLPLPDISDQEEIFAQQDELDKITAGATKIRTIDIMRGQANRANPKTPINSTPAQGPQLPDTPDPIDQAASKDLVTKLQKNKRIYIQDDGPEYLMGHMAEVPAWYLEQDDTTTRLKNRCAWFFGPPTYRYGHNDIEYTTIEYYPWVERIGAIFGKYNTCLAQTYDAGARIGYHADDEDCYDPDVTVVTINLTGNATFLLKTPTGTRTWKLKPGDFIIMKPGAQRCTKHAIRDCTTNRTSLTFRWQARTCPTNLRKITNLPKATNQPQTTEWRPVTKPRPSTTASSDTQTPLVIDQERGYTTTSDVTPTIRLPAENGNNTGAGPSSALTLADLNDNQAPTTNKGKEKLEEMVETGPTIMERFLNTVQEPTQDLWDSASESAASYLAEGLGISAIQALPWAPHLELINALGFQGTERQYGPDNCLIWPITHYRELPRSNNVEAPPEVLELLDCINRYPTDVPMLKTRAAAFGSDVKNLRIGALVKNQDKQWRASLALLCEENEHLLPTTVIHGAGGSGKSHLLQQWVASTERGNVVTILPTIELLRDWQNKCPHAPKETFKTFEKALIQNSAPVVIMDDYSKLPPGYIEAYVSLKGQCKLLILTGDPRQSHYHEENPEALISTLDPATDYFGKFCAYNINATHRNAKTFANALGVYSEKEIPTTITCSSYQKSGWPTLVPSILKRTALNDMGQRSLTYAGCQGLTTPKVQIVLDNATPLCSDKVMYTALSRAVDQIHFFNTGPNHTDYWEKMNATPFLKTFIDHTREETFAEHQPAEPTVREYAPATHFPPANENLALEPWVEPLTDKHSRELFHSALGHSNCVQTENTVVQLFPHQQAKDETLFWKTIDARIKITTPEENIRACSIATDIGDILFLNYKEAMGLPQDPIPFEQALWDSCQAEVQLTYLSKPLAALANAAQRQDPDFDSNKIQLFLKSQWVKKVEKMGCLRIKPGQTIASFMQQTVMLYGTMARYMRRIRTSLCPPEIMINCETNPNQIGTWVREYWNFNTQSHENDFEAFDQSQDANMLQFELIKAKYHSIPEEIIAGYRHLKCNAHIFLGTISIMRLSGEGPTFDANTECSIAYNHTRYFVPKGTAQLYAGDDSACASPLSEKPSFQHISPELSLKSKAKIRTQQKGDFATFCGWLITPKGLIKNPTQLYASWLLAKHNKDLADVARNYALDLRIAYQLKDELYELLSPEELDHHQLLVREMIKHKMGHLLNLPEGFKTN

SEQ ID NO: 1425 - protein, 1780 aa, Potato latent virus, complete genome
MALTYRSPLEDIVGAFEPSVQTAIANTAANHYKQLEEEKGILFNYALPPEAKQRLIGAGIYLSPFSAVPHSHPVCKILENHLLYVELPSRLDNSFMFVGIKNFKLDLLKRRHANLSMIQTINRYVCSLDKIRYGSNFVVRSSASYPELCRRKGELDGAVLRELVPELMIKSAKNLFLHDELHYWTHRDLITFLEVLKPDKLLGTLVYPPELLKGAKKSLNSWCYTYRVDKDKLFFYPDGVHSEGYEQPLSGGYLLETSRITTRDGEVYCVDVVCSKFAHHLIAITRGDLIVPTQRSFAPFEAITSKGLNNLVRGKVECFPVCASVVSKLYRYLRTLKKPDEQSAMAKLSQLQANPTGEEIHFIQGFAKLVINTNKIDSLINCDSIKVFMGKLFGPLPNWLTKRLRSVQEVSLDEFVHYFEPYVVNVPTKHVNYGFEFNYVMEDFRYEQGENDLVDMLDNFDGSTKMSTSLCMMTPYVGLAPLTTRRKFLCHIEENSIFRVVSRNIFCSYTNSYKVAVSTEGVVRILEIYSKVSVDLLGAYLGKLLKKTEFIERVRSRVKAIAIKHLKYTWQQVGLAWFTSGRRGYTKYIDCSPYTMNTFKELKERWGVIVRELSKQQDNAEAAKNIPEQEIQTTSKPSCVEKRNYFSNTLMTSFAASGVKGKEQVSSEIAKGRGERSELRATKLMGSCSTLGKVAHIASRKGSMGVLECVARVIKLDFQTALKFLRVKGVWMQEYESIGELEEEQIQSPAYDFCAAIAMTFNVEIELTFPGSELVYHFAASSTVSCIRLSIWEGVVTLMRAENDCVITACAQALAREPEDVVKVLKDRLEESILEEIWNGEGVPFERMYLFFEALDIQAHCNRDGAQLVLNGGGKLARCFVIKEDHIEFAGEKKVSRVLELQDARTSSKADPELVKEFQKAGTVVEYVAVQSRAQVLAKSLVDATTGVCSSTIFNDCESLERSFRFTESELARNVCCVIGTFGAGKSTLFKDMMRQCLGKGVHYASPRKVLANELKASLGLAKGKRNRKVGTENWNVHTFESFLKKAKNVAEGELVIIDEIQLYPPGYLDLLLYLIPEFTSVFAVGDPCQSDYDNEKDRHVFLGVETDVCRLLSGREYEFNVLSRRFHNLGFESRLPCRFKFPAGAVKEEYLFVNSMTEANELDSAYKSVYLVSSHLEKKIVEYQSDVKTPNVLTFGESTGCTFKYGCILITQVSSACSERRWITALSRFSHNLCFINATGVPIENVAKSYKDRSLGKFLCGTAVEGDIKSMAYGTPIFKEQFIAGVGRDEGVKEDKVTGDPWLKTMLDLMQLPDVEEAEMMQEEMQEEWFKTHLPQEEIEGVRCRWIHKMLAKEARECRMGSIVSDQFPDDHSKQEGKQITNAAERFEAIYPRHRANDTVTFIMAVKKRLRFSRPSVEKAKLTQAECYGTYLLKNFLDVIKLKPAHDEAMMIRAKEDFEQKKVSKSAATIENHSGRSCRDWCIDIGQIFSKSQICTKWDNRMRVAKAAQTIVCFQHAVLCRFAPYMRYIEMKLKEVLPARFYIHSGKGLDELNSWVKEGRFEGVCTESDYEAFDASQDQYIVAFELALMRYLRLPNDLIEDYKYIKTHLGSKLGNFAIMRFSGEASTFLFNTMANMLFTFMRYELHGDEYICFAGDDMCSSKRLRIKKTHESFLGKLKLKAKVQHTEKPTFCGWNLCADGIYKKPQLVFERMCIAKELNNLHNCIDNYAIEVAFAYKLGELAVNRMDEEELGAFYNCVRLITKFRHLLKSNVVEVFKRK

SEQ ID NO: 1426 - protein, 2105 aa, Apple stem grooving virus
MAFTYRNPLEIAINKLPSKQSDQLLSLTTDEIEKTLEVTNRFFSFSITPEDQELLTKHGLTLAPIGFKSHSHPISKMIENHLLYICVPSLLSSFKSVAFFSLRENKVDSFLKMHSVFSHGKIKSLGMYNAIIDGKDKYRYGDVEFSSFRDRVIGLRDQCLTRNKFPKVLFLHDELHFLSPFDMAFLFETIPEIDRVVATTVFPIELLFGDKVSKEPRVYTYKVHGSSFSFYPDGVASECYEQNLANSKWPFTCSGIQWANRKIRVTKLQSLFAHHVFSFDRGRACNEFNHFDKPSCLLAEEMRLLTKRFDKAVINRSTVSSLSTYMACLKTANAASAVAKLRQLEKRDLYPDELNFVYSFGEHFKNFGMRDDFDVSVLQWVKDKFCQVMPHFIAASFFEPTEFHLNMRKLLNDLATKGIEVPLSVIILDKVNFIETRFHARMFDIAQAIGVNLDLLGKRFDYEAESEEYFSENGYIFMPSKSNPERNWILNSGSLKIDYSRLVRARRFRLRRDFLDPISKGKSPRKQLFLESTGNIKSNPNAEKNSESGEIKIEGSAENDQPHEVSHTSMETEDGQGFEGSIPVDLINCFEPEEIKLPKRRRKNDCVFKAISAHLGIDSQDLLNFLVNEDISDELLDCIEEDKGLSHEMIEEVLITKGLSMVYTSDFKEMAVLNRKYGVNGKMYCTIKGNHCELSSKECFIRLLKEGGEAQMSNENLNADSLFDLGRFVHNRDRAVKLAKSMARGTTGLLNEFDLEFCKNMVTLSELFPENFSSVVGLRLGFAGSGKTHKVLQWINYTPSVKRMFISPRRMLADEVEPQLKGTACQVHTWETALKKIDGTFMEVFVDEIGLYPPGYLTLLQMCAFRKIVKGQSENFLKGKLLELSKTCLNIRCFGDPLQLRYYSAEDTNLLDKTHDIDLMIKTIKHKYLFQGYRFGQWFQELVNMPTRVDESKFSRKFFADISSVKTEDYGLILVAKREDKGVFAGRVPVATVSESQGMTISKRVLICLDQNLFAGGANAAIVAITRSKVGFDFILKGNSLKEVQRMAQKTIWQFIIEGKSIPMERIVNMNPGASFYESPLDVGNSSIQDKASNDLFIMPFINLAEEEVDPEEVVGDVIQPVEWFKCHVPVFDTDPTLAEIFDKVAAKEKREFQSVLGLSNQFLDMEKNGCKIDILPFARQNVFPHHQASDDVTFWAGVQKRIRKSNWRREKSKFEEFESQGKELLQEFISMLPFEFKVNIKEIEDGEKSFLEKRKLKSEKMWANHSERSDIDWKLDHAFLFMKSQYCTKEGKMFTEAKAGQTLACFQHIVLFRFGPMLRAIESAFLRSCGDSYYIHSGKNFFCLDSFVTKNASVFDGFSIESDYTAFDSSQDHVILAFEMALLQYLGVSKEFQLDYLRLKLTLGCRLGSLAIMRFTGEFCTFLFNTFANMLFTQLKYKIDPRRHRILFAGDDMCSLSSLKRRRGERATRLMKSFSLTAVEEVRKFPMFCGWYLSPYGIIKSPKLLWARIKMMSERQLLKECVDNYLFEAIFAYRLGERLYTILKEEDFEYHYLVIRFFVRNSKLLTGLSKSLIFEIGEGIGSKWLSSTSTASSRRSNLQTSKLMLSRPQSFTRMQPFSNQTCLIASKGLNQTSRFPLDLVTASSCLISNCLMTPKLIQSGRKATSTNTYTMESSWLGSKQCCQTLEAWKGESLYMMEPAWIRKEATFARIFSSLSLTVATLVSGQSTVCLPQTQIWPKGLDFVWTLIVHNMNRTLSCLLLTLELHTDASTLQGFWKPKLAIQDGLHRQSAAVKHLNSMRKSRWPSWIADPRCFWKKVHQTCTLKRDCSEVTRLEGHAQFPLKGGQTQGCKKREDLGPSRLELKDLEKMSLEDVLQQARRHRVGVYLWKTHIDPAKELLTVPPPEGFKEGESFEGKELYLLLCNHYCKYLFGNIAVFGSSDKTQFPAVGFDTPPVHYNLTTTPKEGETDEGRKARAGSSGEKTKIWRIDLSNVVPELKTFAATSRQNSLNECTFRKLCEPFADLAREFLHERWSKGLATNIYKKWPKAFEKSPWVAFDFATGLKMNRLTPDEKQVIDRMTKRLFRTEGQKGVFEAGSESNLELEG

SEQ ID NO: 1427 - protein, 1962 aa, Citrus leaf blotch virus, complete genome
MALMSNKTAIESILGNFEKKHVDAIYNAAAQTILSHSEFRNKHFAYSLNSYQKKIASKVGIELYPNGYLPHSHPLSKIFENHLLFDVLPGVVNTSRLVMCSIKESKVLVFKGIRDKSRRQVSDLNALNSLNNSHTSFINRLVASKDVSRYTEEADAFFQSKKGSPELFSRNFIKSLENKEAVFFHDEVHHWTKAQMFSFLKSTKVKRFIFTVVYPPEILKKFANSQNPKVYDFKVDKGRLFFFPDGVKTEAYEQKLNMEWLFSASHLRSGDCVWTVTRHKSIYAHHLFEISIGELVTDSKLFFSDYNSIDMSKIFLDRFRSYEVFPISIEHLYKVYSYLLCLKKPDLESGLAKLRQIIGDDVEIKEFLFFEQFCKRLIERQTSWGLFGHSFFEKLTDMALSSLPNSIARIFPQWKKKNTFEFLFSLGTLVVDVERKVCFEHVLEEWGFEVVITDENAYLDPLSIFAINENFNEDRVDDGYLERIRLPFWNLNDYDLKRKRVNAYNILSYRFEEERKIESAQKGPNKMLQIEWYGIKEFKVDPFISNSITEFTLLEALLGKRIDPKKYSYSKQACTLSNYLTFLCAEGLDGFNLEEHLERRLKAAGHDVSDDEEEELTSAEQAGPIKILADPLGFMKECLEEIPIETEPSLEERGQFSTDYHSEKFEINYNDIFNPHNCMNTHGDEIPTPSDGNCFFSAFTETFEVERPDTLRSDFSDWLMEFNGGSYASLAEMIRPNGVFMEAELIYLFCVFRGVTLIIHDRTHEKENVYAVHRGFEEGHMVHRGNHFVGIETYNISTLTSDPLLGDIPCGFSEEITKFHFRPDHFNCAQFRGRKAAFITKVDADYGHNGMVYPHNSWVPSLEEIIQICGQGDDFNCALINFYEANSSLGFHRDNERVYNDDPILTVCTFGEGRFTIEFKDQVTSFLMTAGSFFLMPKGFQKKARHSVSNEMSRVSITFRKHVRRLNGSPIAIREENYKNTCLINAFSKAMKRSKQAIIAKLKTVNSPFWSRYLSEGNGGSIEDCQSACEALDVTVDLNVNGKCVVLGKGALRISMALRNNHFSVINAAQLMERTFVSHLLEKGNVNVLEGFDAMLSGDVGAAGVNKIQFAANFEFARILANSFLNMTTGICLGKALDNGEKYFLHILKDRVKQIGIDVTMVCGFAGSGKSRKLQSWLHSRKKGNFCVVSPRTNLAADWAFKLELEPNEQRKVSTFEKFIKTDKSKLDLIVIDELTLFPNGYLDLLVYELADVNRHCQIILLFDPLQARYHNKMDESILTFEHDVDRLIGGQNIEYIYSTHRMSRYFNRFFDVPCFNQADRTEEQRLWIFDDVYSIPSICSDRQEPCDVLLVESDLEKKAFSPIINVMTFGESQGLTFNHVCILLSESSAASNEFRWMVALTRARTRFSLCSTFLGGIEEFKVKRKESLITSILQGEKITFNRLNLMLKCNLIRREKENGCRDEVDREERLEGDPFLKPFIFLGQRVEKDEDEVEEVKIREPTCQTHLYITEPNFGLCYNFDFIREKEQREYREDMLVTNQFCDSYDKVHINGKRETPGPLRFKAIYPKHSADDDMTFWMAVRKRLVFREEEENYQRLSRAHLVGGLLYTNFKKKMGLEFTFDQGLLEESINAFEKKKLEKSCGTIKSHSIRSDIDWALNDVFLFMKSQLCTKYEKQFVDAKAGQTLACFQHLILVQFAPWCRYLETQIRNQLPEEIYIHSNKNFDDLNAWVKKFFQRDICVESDYEAFDASQDEYILSFEIHLMKDAHFPQKIIDAYIDLKCKLGCKLGHFSIMRFTGEFCTFLFNTLANMAFTMCRYEWRRGQPIAFAGDDMCALNNLAVCHDFDDLFELISLKAKVERTETPMFCGWRLTPYGIVKEPELVYNRFQVAIEEGKVLECLENYAIEVSYAYSLSERLYEVLKSERQVQYHQAVVRFIVTHIDKLKTKVRDLFLEQSSDEDI

SEQ ID NO: 1428 - protein, 709 aa, Apple latent spherical virus segment 1
GPEQMYIPTARSESFGSVCLLGKWTGPKPYFLENSSLTPSLIHDCIDIDMTTEPAILSKKDPRLQYTNNKDFDPFLSGMGKYAVEAHSFDEDEELFEDALDRVFSEIPMFTCEDLSNDQVCNGIEDDDYAEGLVMQTAEGYPFCTMRPPGVTGKTWLFAGSPGDWHIVPNSLLANELNVKELNLSKNIFEPVIGIDFPKDEKVDSSKVYIKQKTRLFTILPVDYNILVRKYFLSFVSQLMALHNEVPTKVGIDPISNEWSILCHSLHSKGTNWFNGDYSRFDGITPRNVLQGIVKRISRRYANKSSFAITDPTLSINGDLARSLLMDMCSTRYGLTNGDLWYVTSGIPSGFPLTVIVNSLVNSFFVHFAYMKLHSSEVHKALYPLYSFRTLVSYAVYGDDNLISVHDTIKDTFNLVTISNLLLEHGVTLKNGADKNEEILSPFYPIEKVDFLKRRFTTLQGHIVAPLNTVNITERLHWVRKGLGDADATLENCKSALFEALFHGELYYNDLRGKIEKACKVKGLPLIVPDYQDALSLFLTGGSYAKAIQAIAMNLPDRISLYKSEFYSVQIYPQIFYVTNERNVTLQKLLETTTLRNICYVSRNYESRSSSRGLFTLKGEGWTPAALKARLSVYKAMAKPVYFVDEANDGLAMFYCLDYAFRVCGLTRSQIAKILNAVFGGNPEVCQRIFQFFSQVEPTNKYIPPNQRR

SEQ ID NO: 1429 - protein, 2195 aa, Soybean latent spherical virus isolate ND1
MSFHCPSSTCLGYTQSFSRRDMREQGDRCPHAMCGALLVKKVPTLSPQGARPVVSKTTVVVPPQATEEVLYYGCAPRPAFLEAVLAAPKLKMAPPVVDAMEVAYLRGVAAMEAEEKKLLRKEKAAVVARAKARRAARKAAKKQVAEMKATVALKLATRQKTARLSAAKRAMKAKRKAAKEAARLALEERRAAGLTRKSAFRRSLKKKATKMAGRKVPKTSTSTFPKVESFSCFPSSPLPAFIREEQPWVAVNTPCPHPEGFDLAVDPAFVAPIVGPIVSVPFMAPVVKAFNSLVEILAAINYEAAVDLRAYILEIASYENFFALRRIFVGKALSWMALILPLYPYAGIFDTYLPLDMVEDKNCDAYLASLQQTAVMVLEVTQGPMDAHSIFDIVRSVGSKVASIKDKVVGCIVEKSAALLDTVIDTAKGMFFGVLGPYLARAQKIGEEIKKFWDNCVEWATKLWQGAHIALQALGIYAVWAIVAMVLVGVMYILETILICLGVMSGHGVLVVALTGAVMTFLGFTVFQMGREYIHFLTALRQIIFLAVIPQGGLTQVNIMDSSVDVTEPHSLLDTAMAPVHFLETVASGLTFFSSTSVTVLGKLGNSLEGIRKGFNCLRDFTSVLLEQFGNAFEYISGKRTSFFRDLACAVKVDIARWTQDARETIEYFEISGSLDRYEYYRARELIYQGQDLIDTANKARSSHTSVKFLRTIGKLVEELKEIRAKCARSLKFPGWRRQPFWVYCFGESQCGKSTLANYLMPLLMSHMGWDPQDVYSKDPVDGYWSGYYQQKGLKINDLSAVNSKDVAPLEQQLIPLISTEEKMVSSAEIEGKGMQFASEIVVSSSNFNDAPTGAEILDADAYRQRRKVLMRCRRAAEWVHNADGTRTEKLDAEGKIVYKPYDPSNALSCTEVQWIHPVSFTALPGPCGQWHLAEFTIPMVKEAMDAHFLQEETKMASWKSSLGMKSQTARKMGSYLQDMIKGIGNFVTLKGAKDSDPRYLLVAVDGKCYALDQQGKATPYEDCDVVEEIERLTLLQYRSYFADLVMEHADNTYYQDSFHSSTVRDFLLALMKDGSTVLSVDSLGSSTQDIHKELWAELGLSEKIFLRVSQIARNQLRDAPHFKEDVAHNFLETMRHLRDAIVDRKEQILLFFAAVALVGLFSWGFLSLIKQFACGSLGFGAGIALREQIAHSSVMSSGSVTSAFVARNMPVVWGKAARYATAHSSKEEVGANFDYFEDASAHLLARVVGSSGQSETCLLFGHQAIALCAHQLRLFPDNDRVTIHYFSKERRPVCFSFTWHYINAIEWPDCEVIVYRDAQLTPLPVYSDDNYLCGEQTLPTVLTITGLSIKKKKFFDDSTLCPSEKILDGEMPIVRSWKDTASLRTQVQTILSETHRRDINRYYTSSYPSGKHDSGGIITAVINGKRKVIGMHCAGAQNGKIYVSTIGLLPTRNINDAHSAADYFVPSIGREEKGFCKIGWIADPSKRPHAATKTALAPVPKELALPLPEGVSVKIPSILSAADPRLRDEVNPEFKDYDPLRVGMDKFANPMDPLDDEVLQRVCEDIYETWYDCLPILDDEKVFLQKTSLEVALNGIPGEACYEAMRLDTSEGYPFVLERKPGESGKLSYVHIDENGVRSLIPGTSVFRDYHELSASILTQVPVLNCIECPKDELLKPSKVLEKPGTRLFDVLPFTHNILLREYFLNFCVFLQQNRVHLPCSVGVNPYSREWTWLFDRLAAKSDKALNCDYSKFDGLISHQVYMHMVATINRLFRDGEEANCARKNLFLMFTSRRSICYDQVYMVKGGMPSGCALTVIINSILNEILVRYVYRITVPMPAKNYFNKYVELVVYGDDNLIAIHDDVVSFFDGPIIKEKLAEVGVTITDGTDKSSPTLLRKPLESLDFLKRGFRKIEGGMYSCPLDKGSLYSRLYYSAGGKGGLFQLDILHDNVKSFLEELTHHADHYEEFQRVRSFYIKRIPSWSATLPTYATCLNMMEGQRNSATPWQPHKFIETRPSGCETKMMAGQDNHAQKICVTERIIICGEKYTPPILETSFVVSIDNPLYIGERGEYVKTEFGSGMGRLPTDAWIKAFSSPKKHPQLFEAYKMGATIYFRSCMPYLNAWCAVCKFALAHGIDQSSIIAMYESCKPRGAGDIAPLVAVKAYTKFVNRPVFKFKETVHKEVLEAHNSVRVA

SEQ ID NO: 1430 - DNA, 3171 bp, Spinach latent virus
  source 1..3171: mol_type = other DNA
atggatacaattgttcaaatgaaagtattgtgttacgagtcgatgatattattaatgataccttcagacgtaaacgcaccaaggccggaaactgccattggtaggttgatttccgatgccgctgtttcaggtgttttgcgacaatgcgatttcactgcagcggaagcctctcaatgttttgttccaattatcaccggaagatcagaatgcattgagacgcgattttctggaagagaaatacagtttcgcaatttttcgtattcctcacaatcattcgctgctgcgcatcgagtgtgtgaagcggattatatttatagtcgattccagacgagaaataccacgatcattgatattggaggaaatttttgcacccatagtaaaatgggtagagataatgttcattcatgttgcccgatattggacgttcgtgatggagctcggtatactgacaggttcatgtctgtggcgggggctttggaaacccagcctgaccgtgagctcagactgaactattgttccaataaatttgaagattgtgatgtttccgcaccatgggcgatggcgattcactcgatttcagatataccgatcacaagtgttgttaagcattgtttccgcagaggggtcaagaaattgatagcctctgtgatgatggatcccatgatgcttgttgcttctcaaggttttatgcccagattgaatgttcaatgggaaattgaacctgatgaggagaacaaaggttcccggcgaatttcttttcatttcgtcgatgctcctggattgtcatatactcataactatgacgtgcttatgcagtacatgacttgtaatcaagtcataatcagtgggaaagccgcgtatcgagttgagcgcgttgcagatctgtctggtgtttttattgttgagattaaccctggcggcaactgctggaatgaaagactggatctagttcccatgcgagatgtttcatgcgcgtggatgacttcgttaaaacgtaagaccttagtgcgggttgccatcccgcaatatattcattcatgggaagttaagtatgtgattgccgacactgattttgttagaagagttgctgaagtgtcgttccgtcagtataaaccagaaacaccattacaggatttggtgaaatctgttgcgacgatgatttcctctgcttctaaccattgcattatcaatggtgtcaccatgcaaactggtacaccgttggccattgaggactatgtcccaatggcggtgacttttgttgccttcgctaaatcaagatatgattcgataaaggaaggcatgaaaatggttaggcagagaggtactaatatcgcggatcctaatgatcattatgattatgagaaagatggatcggatgttaagagtttttcaaatcacataattcccatgaagaataccatcaagtctctgtttttccccatgaaagtgaagatgaatgataattctatgctcatttatagtcaaggaatcttgtcaactgttgttgatgagataaaaacactttttggatgggatgtttgggacactgacgatgcggtaatacagtctctgccctctttttataagatggaggatgtttttcaagttacgtctgaccactattgtttatcacatacattatctgtggattggtggttggagggactgtatgattcttaccatgacatgcgtgttgcgcataaaaagaaacttgatgaagaagaatctcggaagaccaaggtcgagaatgccttattgaaaattgctgaggttttggagaaacctgatgttagcgatggtcttaaagctctttcagaattgcccataatatcatcattattggagaagaagagcgaagaaatcgttacaaaacctcaatgcagggatactgaaaaaccccatattaatccctatgctgatgcaatcaaagaggcgcaggcctattacgaagagcttgaggtcgtaaatactcgcaatttgagaggtgttggtgattacctcttttggcgaaagaagtcgaactatgccagcgtttggggcgctgatgaatcgagagtggttcttgaacctatggcaaggaagttttactctcgagatagaaatgtttccatacccgagtatgagcgaggtatgacggttgatggtttcgtctccattaaatgggtggacggaaacattactgaggacacgtggaagtgtctttccaaatacgcagttgttttgctcgactcttcttgcgtgtttgatgccggttcacgtattatgccaggtctgaaaaaggcattggtaatggatgcaaatttcaaaatcgtgatcgaggatggtgtggcaggatgtgggaaaacaacatctctcctcaagcaagctaagccggattcggatttgttgttagctgccaaccgtgagactgcaaatgacgcaaaagccagcggcgttattcctaaagcgcttgaataccgagtgagaactgtggattcttacttgatgttgagaacgtggttcacagccgagagattgctcgttgatgaatgtttcttggtccatgctggcttggtctatgcagctgccaccttggcacgagtgaaggaagtaatagcttttggtgatacaaagcagattccattcgtgtctcgtataccaactgtcaaactcagacacgcgtctgttgttgggacgttgaagccaagaacaattacctacagatgccctagggacgtgacggcagtccttagtgagaaattttatggtactaaggttaagacgtttaatcttgttaaacagtctttggaattgaaaaacatagattctagtaccgaaatacctgtagaaaaggatacgctatatatagcgcatacccaagctgataaacatgctttgatgcgtttacctgggatgaatggtatagaagtgttaactactcatgaagcccaagggaaaacaagagaccatgtgatacttgtgcgtttaagtaaaactaccaatttattatattccgggaaaatgcccgatgctggtggttcgcacaatcttgttggtctgtcccggcataagaaatctttgagatattttagtgtctttgccgatgatccagacgatcaaattgcgactggaattcgctggtccaaaacattggatgagcaagagttagcagcttatagagctgctggttag

SEQ ID NO: 1431 - DNA, 2394 bp, Spinach latent virus
  source 1..2394: mol_type = other DNA
atggattcttaccacttcttatctcagttgtgtgacttgaatgttctgactcatgcgctttatgttaatcaagtgtttgagattgtggatcagtccacaactagttatatgcagatgtggctttattcccgtgttattgtcccagttttgaaatatcatctcagtggagatattatattggataaattgcacgatgtgttccttggaacctttcgttcaatgatggtgccgatgattatgttgaaccgactttcattcgtcgtgaagatgacgacgatgaaccaccaccggaaagcgtatttgccgcttgaagaaagggaaaaaattcatgctgcgacgtttcttggtcatgatcattgggcaagcgttacttcgggatcatctttttatgatgatctcgaaattctcgctgatgagaccgtgaacgatgatttgcattttgataaagaatcttccatgccagatgagtatcagatcatgtggaatgatggtacaattgattccgtttggtctagtcagtttgaatgcgaagaaccaccgaaaccgaaatttataccacgcccttctgataaggtgtgtgatccagtggttattcaagatgccgtgaacgatatattcccatttcatcatgagatggatgatcgatatttccagacgttagtggagacacaggatatttcccttgaggtttcgaagtgttggatagatgcctccaatttcagagattttgttaagggtccaaattcttatgttgagcctgtgtttcaaaccggtgccactagtaagagagtgcatactcaacgtgaggctcttttagctgtgaagaaaaggaatatgaatataccggaattgcaatccactttcgatcttgatgcggaagtcaacacgtgtttcaaacggtttctcacacacgttgttgatttgccacgattaaaaaggttgcaacctatgactggtgttgaggtggaatacttcaatcaatacttgcttgggaagaatccacctgtgaaggaatatcaaggtcccttgacattgactgcacttgataaatatatgcatatggtcaagacgattgtgaaaccagtcgaggacaattcgttgaagcatgagcgacctttgtgtgccactattacctatcataagaagggtatagtgatgcaggcctcacctcggtttttgagtgctatgtcaagattggtttatgtcttgaaatcaaaaatccatattcccagtggtaagtggcatcaacttttcacgctggatgctggaaaatccgatgccgtaaaatggtttaaagaggtggatttttcaaagtttgacaagtctcagggcgagttacatcacaaagtgcaggagaagatatttaatgctttaaagttacctcccggatttgttgagatgtggttttccgcccatgagcgatcacacattgtggacagagaagcagggattggattttccgttgattatcaacggagaacaggagatgccaatacgtatttgggtaacactttggttactttgatttgtttggctagagtgtatgatttatgcaatcccaatattacctttgtcatcgcttcgggtgatgattctttaattggaagcgtcgaagaattaccgcgcggaccaggagaatttatttacaaccctgttaattttgaagcgaaattccctcataatcaaccatttatatggctcaaagttttagtaagtgttgatcttgaggatggtggaagagaagtgatcgctgttccaaaccctgcgaagttgttaattggtatgggaagacgagactgtcaataccaagctcttgatgatttgtatcaatcatggcttgatgtgatatattattttagagatgctcgcgtgtgtgaaaaagttgctgatttgtgcgcatatagacagacgcgaagaagctctatgtatttattaagcgctctgttgagcttgcctagttgttttgctaataagaagaaatttaagtggctctgttatcgtttaagagagcaagggtgtctgaagaaggatatttatcctgtagcaaaacctataagtgcccataatataaggaaagaagattcaaatggatgcgatgttaatcaaggaacagatgattcgttctcacggaaaaagaatcgtggatgctgggagtatgtcccaaagatgttgcagactgatgtgtctgttcctgttactgataaatctttccacagtaacagaggctcgtcggtttccccaaccgattgcggtgatggagggtgctccagatccgccagctcgattggtagtaaaaataccaaacctcgccatagatttcgagctgcaggagttcaccaacccagcggtcgtgatccagaccgtataccgccgaatcatcgacgaagtgcctaa

SEQ ID NO: 1432 - DNA, 2364 bp, Olive latent virus 2 RNA 2
  source 1..2364: mol_type = other DNA
atggccggagtactttatgatgaggagtacgttccccaggaaccggattacttgtattgcccgtacgagtgggagggtgaagatcctacccaatgcgatgcaaatgttccgtccgtcagctaccttgtggaggctgtaaaaaaatcctttactgagggtaaccacgatatgctgatttcttgcgagtcgtaccacgccgagtgttgcgagggtcccttgatgaacaagggtttgaccctctcgacttactttatgagttatccgggcatttcattacctgcgttcggcggtggtgtgattcatgtcacttcagctcgcgtctgcatgcaagctttttatgccgtgaccccaggaaggtgtagttgttcgtgtggtacgcaattcatctatcgtgccaaaggtggaactggtctaacatttgacgccacgaacactatttctagtgcctttaagttcgaagacgggaaagtgaaatggttaacagaagacctaggcttggcattattggctggttgtttcttgaaatacgtgccaatacctcatgagattgaaattaagatcgaaagaaaggtcgagcccgtgtctgctctggatttttgggaaccagaaggattgatttctgacgtacatttcgtacatccgcaagagagagccttggctcctgagcctccaatggatgtagagatggtgagattagtccgtacggaattgtttgaacactttaatcccacccttcttctgaacgctcggtcggatttttccggtgagaaactgaaagaggttgagttgccacgagctcaatcggaacccttagtccctagggtctgtctcccgcgaggtgatgacgctttaattgatcagtttttcatagacaaggcacccgagcattttaatcgtgaacctgccacagatcaatggcaggtggaatctgatgactttactgtggatttccccacccaagtgcgattacgcgaacgggacgaagattggttcagaaggaaacccgatttcgctgtgtcgtccattcgtacaggtctcgagatgcctcgaattgctacaaagaaggaaatgttaatggcattctcgaagagaaacgttggagctcctcagatggtagaggtacctcaggagatccacgtgaagaggttggctgataggttcttccggacattcttgaaagaaggcggctgggataagggggatggtcattattgggatgattttttccatagaaagggtcgaaaggtcttttcattggagaattgttacgatgaccccttgtcctcatacttagttatgctgaagtccgctgggaaattctctctagatctgaactttccggttcgatcggtaccccaaaccattacttatcatgagaagtgggttaccgaggttttttcccccatgtttctgcaggtgatggcaagatttttctctcgtctgcaagattgggttgttgttccggctggtccgatggctgacttctcccgtgtttggcctagctttgaggggaagtgtttaacagaaattgatctgagtaaatttgataaatctcaaggtaagctgttgcatgatgtgcagagggagattttcctccgtctgggtttcccacccatttggtgtgattggtggtttaaattccacgagtcttcctatttaaatgataagaaccttggtatagctttctcagtagattaccaacgtagaacaggcaatactgccacttactttgggaacacgttggtaacaatgattatgatggccgaagtgtatgaacttgattctctccctttctgtggtttgttttcgggtgatgacaacttgatcgtgactgatcgacctcttgaaggtcgagtttcgttattcccgaacatgttcaacatggaggccaaggtgatgcgtccgggtcagaattacatgtgtagcaaatacctttgcactgtagacggtcgcgtaacccctgtccctgatccttttaagttgctgaagaaagctggtgcctcgtgtcctttggagcaccttgatgacttttacgaatcgtttctggattataccaaatacctggtgagggatgaagttagaacattaatacccaggttgatggcccacaggtatcaagtctcgatggatgaagctggagttgctcttgatcagattatgagctggcgaaagtcaaagactcaattctttaagcatttccagtacaggaaaccaatcaaggactcgctcgaggctgtgaaatccgacttcctttctgctttcggaaaagtagatgatcgaataagagtttggcgcgggcgtcgaaccaatcataagaaggaggtcgatgctttaaaggtcccattggtgagttttagggagtga

SEQ ID NO: 1433 - DNA, 4950 bp, Citrus yellow vein clearing virus isolate CQ
  source 1..4950: mol_type = other DNA
atggccactattaggggtgccatcgaacgcattacagacaccaccgtacgcactacacttcaagaggaggcatgccgccaaatacgcgctgaacttaaaaacgtcgaacacatcaaccgttacgctatacagcctgacgccgccgacgcactcgaacacctaggcattggttctaaccccttctctgtggcactgcacacacacggtgcctgcaaagcgattgagaaccaattactctatgtagttggtaccttactcccaaaagaacgtgtcaccatgctcttccttaagaaaagcaagctcaacatcatgaaacgctgccctaaattccaagacatcttcctgaaccaacatattgaaccacgcgacgtttctaggtactgcgactttaacgtccaatccacctccaccagcatacccacacgaacggcttacatcagtgacacactccactttatggaccgtagagacctagtccgactattcctaaacagcccaaatctagagactctctacgccaccattgttctcccagtcgaggctgcttacaaacaaccgagccgctacccagagatataccagattaactatgacttcgacggtttccagtacatacctggaggccatgggggcggcgcctaccaccacgagttcgaacagctgcaatggttagacactggccatatccactggcgtgggcccgactgtaaagagattcgcatgacaattaccgcccaaatgctcgaaagcttaggtgcgaatcatcttttctgcttcaaacgtgggaaactactcaccccacgtgtacgcactttcggccgagatacccaagtgctcttgcccaaaatcttccgcccggccgacaaaaactttaacagggcaataccactaaccctagctaacaaactactcctgtacgctaaatccattaacacagtgaccttccgcgacgtcgttgccaagacacgccaacttatgaaggacaaggagcttgaaacatacaccggcaacgacctgttgcatatggccaactatttcttcgctgttggagcactgtcaggagttaactcctatgaccaattgcttggcctatccgcctgggaagcctgcaccgtccgtatcaagaacaccataacaaatctctgggaaaagattgccggaaagaaagagttcggcaagctattggaggcccttgagtgggaaacattcacatactcacgtcaagtgaccgaattcaccgttacgggactgcccgccctgctccccctcccagacatctcagaccaagaagagattttcgcccagcaggacgagttagacaaaatcactgccggcgctaccaagatacggactattgacattatgcggggacaagctaaccgcgctaacccaaaaactccgatcaactcaacaccggcccagggaccccaactgcccgatacccccgacccaatcgaccaagctgcctccaaagacctcgtcaccaagcttcagaaaaacaaacgcatttacatccaagacgacgggccggaataccttatgggacacatggctgaagtccctgcctggtatcttgaacaagatgataccaccactagactcaaaaaccgctgcgcttggttcttcggcccacccacctacagatatgggcacaacgacattgagtacaccaccatagaatactacccttgggtcgagcgtattggagccattttcggcaagtacaacacctgtcttgctcaaacttacgacgccggagcccgtattggataccacgctgacgacgaagactgctacgaccccgacgtcaccgtggtcaccatcaacctcactgggaacgccaccttcctgctcaagaccccaaccggcactaggacctggaaacttaaacctggtgacttcattatcatgaaacccggtgcccaaaggtgcacaaaacatgccattagagattgcacaactaaccgcacatccttaaccttcagatggcaggcccgcacttgccccactaacctcagaaagatcactaacctacccaaagccaccaaccaaccccaaaccactgaatggcgtcctgtaactaaaccacgccctagcaccaccgcttccagcgacacccagaccccacttgtcatagaccaggaacgagggtataccaccacctccgacgtgacaccaacgattaggctgcccgccgaaaatggtaataacaccggtgctggaccctcctccgcattaaccctcgccgacctgaatgataaccaagcgccgaccactaacaaaggaaaagagaaacttgaggaaatggtcgaaactggcccaactatcatggaacgcttcctcaacaccgttcaggaaccaacacaagatttatgggactccgcctctgaatccgccgcgagctacctcgctgaaggcctcggcatctctgccatccaagcactcccttgggcacctcacttggaactcatcaatgcattaggcttccagggcactgaaaggcaatacggcccagacaactgtctcatatggcctatcacgcattacagagaattgcccagaagcaacaatgtcgaagcccctccggaagtgcttgagctgctcgactgcatcaatagataccccactgacgtcccaatgctcaaaactcgagccgccgccttcggttcagacgtcaagaatctacgcataggggcacttgttaagaaccaggacaaacagtggcgcgcatcactcgcactactttgtgaggaaaatgaacacctcctccctaccactgtaatacacggcgctggtggctccgggaaatcccacttactccaacagtgggtggcgtctactgagcgcggaaatgtagtcaccatcttgcccactatcgaactccttcgagactggcaaaacaaatgtccacatgcaccgaaagagactttcaaaaccttcgagaaagcgctcatccagaacagcgcccccgtggttatcatggacgactactctaaacttcccccagggtatattgaagcctacgtcagcctcaagggccagtgcaaacttctcatactcactggagatcctagacagagccactaccatgaggagaaccctgaggccttaatctctactcttgaccccgccacggactactttggcaaattttgcgcatacaacatcaacgccactcatagaaatgccaaaaccttcgccaatgcgcttggggtgtactctgaaaaagaaatccccaccaccatcacctgctcatcctaccagaaaagcggttggccaacacttgtcccatccatccttaaaagaactgcgctcaacgacatggggcagcgctcactaacctacgcaggctgtcagggactcaccaccccaaaagtgcagatagttcttgacaacgccacaccactatgctctgacaaggtcatgtacaccgcactatctagagcggtggaccaaattcacttcttcaacactggcccaaatcacactgattactgggaaaagatgaacgccacacctttcctcaaaactttcatcgaccacacacgtgaggagaccttcgctgagcaccaacctgccgaacccacagtgcgtgagtacgcaccagcaacgcatttcccaccggctaacgagaacctagcactagagccgtgggtcgaaccgctgactgataaacactcgcgggaactcttccactctgccttaggccacagcaactgcgtccagactgaaaacaccgtagtccaactttttccccaccaacaggccaaagacgaaacgctcttctggaaaacaatagatgccagaatcaagataaccaccccagaagagaacatcagggcttgcagcatagccactgacattggcgacatcttgttcctaaattacaaagaagccatgggtttaccacaagaccccatacccttcgaacaggcactctgggactcttgtcaagccgaggtgcaactaacctacctcagcaagcctctggctgcactcgcaaatgccgcccaaagacaagaccccgactttgactccaacaaaatccaactcttcctgaaatcacaatgggtcaagaaagtcgagaagatgggctgccttaggatcaaacccggccaaactattgcttccttcatgcaacagactgtcatgctatacggaactatggctcggtacatgcgccgcatccgcacctcactttgcccacccgaaattatgatcaactgcgagaccaacccaaaccaaatcggaacatgggtgcgtgagtattggaacttcaacacccagagccatgagaatgactttgaagcgttcgaccaatcccaagacgccaacatgttacaattcgagctcattaaggccaaataccactcaatccccgaggagatcatcgccgggtatcgacacctgaaatgcaacgcccacatcttccttgggactatatcgatcatgaggttgtctggtgaagggccgacctttgacgccaacacagagtgctccattgcatacaaccacacaaggtactttgtgccgaaaggcaccgcccagctctacgccggagacgactctgcatgcgcgtcgcccctctctgaaaaacccagcttccaacatatctcaccagagctcagcctcaagtctaaggccaagattagaacccaacagaaaggagactttgcgaccttctgtggctggctcatcactccaaaaggcctgatcaaaaaccccacccagctttacgcctcctggttattggctaagcacaacaaagatctcgcggacgtggccagaaactatgccttggacttacgcattgcctatcaacttaaagacgagctctatgagttattatcacctgaagaacttgaccaccaccaactgctcgtccgagagatgatcaagcacaaaatgggccatctcctcaacctccctgaggggtttaaaacaaactaa

SEQ ID NO: 1434 - DNA, 5343 bp, Potato latent virus, complete genome
  source 1..5343: mol_type = other DNA
atggctttgacttacagaagtccattggaagatattgttggtgcatttgaaccaagtgttcaaacagctattgcgaacacagctgctaaccactacaagcagcttgaggaagagaagggaatcttatttaattatgcattgccacctgaggccaaacagaggttaataggcgctggcatatatttaagtcccttttccgctgttccacattcgcatcctgtgtgtaaaattttagaaaatcatctgttgtatgtagagcttcctagtagactagataattcttttatgtttgtaggtattaaaaactttaagttggatctgctcaagcgcagacatgcaaatctaagcatgatccaaactatcaatagatatgtttgtagtttagataaaataaggtacggttcaaatttcgtagttagatctagcgctagttatccagagctttgcagacgcaaaggtgagcttgacggagcagtgttgagggaattggtgcctgagttgatgattaaaagcgctaagaatctattcttgcacgatgagcttcattattggacccatcgggatctgattaccttcttggaggtactgaagccagacaaactgttgggcaccttagtttacccacctgaattgctaaagggtgcgaagaaaagtttgaactcttggtgctacacatatagagtggacaaagacaaattgtttttttatccagatggcgtccattctgaaggctacgagcaaccattgagtggcggttacctcctcgaaacaagtaggattaccacacgtgatggtgaagtttattgcgtcgatgttgtgtgcagtaaattcgcgcatcatttgattgcaataacccgtggtgatctgattgtacccacacaacgcagttttgctccctttgaggccataactagtaaaggtttgaataacttggtgaggggcaaggtggaatgtttccccgtatgcgcaagtgtagtgtctaaattgtataggtatttgcgcacactcaaaaaacccgatgagcaatcagcaatggccaaattgagccaacttcaggcaaatcccactggggaagagatacatttcatccagggctttgccaaattggtgataaatacaaacaaaatcgacagtttaatcaactgcgatagtattaaggtgttcatgggcaaattgtttggtccgttgcccaattggcttaccaagagattgaggagcgtgcaagaggtgtctctcgatgaatttgtccattactttgaaccatatgtcgtcaacgtgcccactaagcatgtgaactatggttttgagttcaattacgtaatggaagatttcaggtacgagcagggtgagaatgatctagtggatatgctagacaattttgatggctccacaaagatgagcacaagcctttgcatgatgaccccatacgtcggcttagcaccattgaccacgcgacgcaaattcctatgccatatcgaggagaattccatattcagagtggtgtctaggaacatcttttgtagctacacaaatagttacaaagtggccgtgagcactgagggggtggttcggatacttgagatttatagcaaagtgtctgtggatctactgggagcgtatttgggaaaattgctcaagaaaacagagttcatagagagagtgcgatcaagggttaaggcaattgccataaagcacctcaagtacacttggcaacaggttggtctagcttggttcaccagtggaaggcgtggctacacaaaatacattgattgcagcccatacacgatgaataccttcaaagagcttaaagagagatggggtgtgattgtgcgtgaattgtctaaacagcaggacaacgctgaagctgcgaaaaacatacctgagcaggaaattcaaacgaccagcaaaccaagttgtgtggagaagcgaaattacttctcgaacactttgatgactagctttgctgcgtcaggagtgaaaggcaaggaacaggtgagctccgaaattgccaagggtaggggtgaaaggagcgaattgagggcaactaaattgatgggctcatgcagcaccctcggcaaagtggctcacatagcatcaagaaaaggctccatgggggtattggaatgtgtagcgagggtcatcaaattggatttccaaaccgccttgaagttccttagagtcaagggtgtgtggatgcaggagtatgagagcataggcgagttggaggaggagcagatacagagtcctgcatatgatttttgtgctgcgatcgcaatgaccttcaatgttgaaattgaattgacgttcccaggctcagagcttgtttaccacttcgctgcaagttcaactgtgagttgtatccgcttgagcatttgggaaggcgtagtcacactgatgagggctgaaaatgattgcgttatcactgcatgtgcacaagctttagctagggagcctgaggatgtagtgaaggtgctcaaagatagattggaggagagcatactggaagagatttggaacggcgaaggggtgcctttcgagagaatgtatctcttctttgaagctctggatattcaagcacattgcaatcgcgatggtgcacagctagtgttgaatggcgggggcaagctggcgcgatgtttcgtgattaaagaagatcacatcgagttcgcaggtgagaaaaaggtcagtagagtacttgagctccaggatgctagaacaagtagtaaagcagacccagaattggtcaaggagtttcagaaagccgggactgtggtagaatatgtagcagtgcaatccagagcgcaagtcctggcgaagagtctagtggatgcaaccactggggtgtgcagctcaaccatattcaatgactgtgagagcttggaacgttcctttagattcaccgaaagcgaactagcgcgaaatgtttgttgtgttatcggtacgtttggggctgggaagagtaccctgttcaaggatatgatgaggcagtgcctagggaaaggtgttcactacgcatcacctaggaaggtgttggcgaatgagctcaaagctagtttgggtttggcaaaagggaagcggaatcgaaaagtagggacagagaattggaatgtgcacaccttcgaaagtttcctaaagaaggcgaaaaatgttgcagagggtgagttggtgatcattgatgagatccagttgtacccgcctggctacctggatcttctactttacctcatacctgagttcactagcgtcttcgcggtcggtgatccatgccaaagtgattatgacaacgagaaggataggcatgtcttcttaggggttgagacagatgtctgtaggcttctgagcggccgtgagtacgaatttaatgtactttcccgcagattccacaacttaggctttgaaagcagattgccctgcagattcaaattcccggctggagcagtcaaggaagagtatttgttcgttaattcaatgactgaggctaatgagttggacagcgcctacaaaagtgtgtaccttgtgtcatcccacttggagaagaaaatagtggagtaccagagtgacgttaaaacgccgaatgtgctgacgtttggtgagtcgactggttgcaccttcaagtatggttgcattctcatcacgcaagtgagtagcgcatgtagtgagcgcaggtggatcactgctctatcgagattttctcacaatctctgtttcatcaatgcaactggtgtgcccatagaaaatgtggcgaagagttacaaagacagaagtttgggaaaattcctgtgtggaactgctgttgagggtgatataaaatcaatggcttatgggaccccaatcttcaaagagcagttcatcgccggcgttgggcgcgatgaaggtgtcaaggaggataaagtcaccggtgatccttggttgaaaaccatgttggatttgatgcagctcccagatgttgaggaagcagagatgatgcaggaagagatgcaagaagagtggttcaaaacccatttgccacaagaggaaatagaaggggtcagatgccgctggattcacaaaatgctagctaaagaagcgagggaatgtagaatgggatcgatcgtttcagaccaattcccagatgatcatagcaagcaagaggggaagcaaatcactaatgcagctgagcgttttgaagctatatacccaagacatcgggcaaacgacacagtcacattcattatggctgtgaagaaaaggctgagattttccaggccttctgttgagaaagcgaagctcacgcaggctgaatgttatggaacttacctgctcaaaaacttcttggatgtgatcaagctcaagcccgcacatgatgaggcaatgatgatcagagcgaaggaagattttgagcagaagaaggtgagtaagagtgctgcaaccatagagaatcacagtgggaggtcatgcagagattggtgcatagatatagggcagatcttttcgaaaagtcagatatgcaccaaatgggacaacagaatgcgggtagctaaagcagcacaaacgattgtttgctttcaacatgccgtcttgtgccgctttgctccctacatgaggtacattgaaatgaagctgaaagaagtgctgccggctcggttttacattcatagtggcaaaggtttagatgagctcaactcttgggttaaagaaggtaggtttgagggagtgtgcactgagtccgattatgaggcttttgacgcttcgcaggaccagtacatcgtcgcttttgagttggcactgatgaggtaccttaggcttccaaatgacctgattgaggattacaagtacataaagactcacttgggttccaagctggggaattttgcaatcatgcgcttctctggtgaggccagcacttttctattcaacacaatggcaaacatgctcttcaccttcatgcggtatgagcttcatggcgatgagtacatttgctttgctggtgatgacatgtgttcatcaaagagattgcgaatcaagaaaacacatgaaagctttcttggaaagctgaagttgaaggctaaggtgcaacacactgagaagcccacattttgtggctggaatttatgtgctgatggaatatacaagaagccacagctggtctttgagagaatgtgcattgccaaagagctcaacaacctgcacaactgcatcgataattacgcaatcgaagtggctttcgcttacaaacttggggagctggctgttaacaggatggatgaagaggaattgggggccttttacaattgcgttaggctcataacaaaattcaggcatctgctcaaatccaatgtagtggaggtctttaagcgtaaatag

SEQ ID NO: 1435 - DNA, 6318 bp, Apple stem grooving virus
  source 1..6318: mol_type = other DNA
atggctttcacttacagaaaccccctcgaaattgcaatcaacaaacttcctagtaagcagtctgatcaactgctttccttgaccaccgacgagattgaaaagaccttagaagtgaccaaccgcttcttctctttttcaatcacaccagaagatcaagaattgttgactaagcatggtctaacacttgcacctatagggtttaagtcacactcccatccaatatccaaaatgatagaaaatcatctcctgtatatatgtgttccgagtcttttatcctcctttaagtcagttgcctttttttcacttagggaaaataaagtagacagttttcttaagatgcattcagtcttttcccatggaaaaattaaatctttggggatgtacaatgctataattgatgggaaagataaatataggtatggtgatgtagagttttcatcttttagggatagagtgattggtcttagagatcaatgccttacacgtaacaaatttccaaaagttctgtttcttcacgacgagttgcactttctaagtccatttgacatggctttcctatttgagacaatcccagaaattgatagagttgttgcaaccacagtttttccaatagaacttttattcggggacaaggtctctaaggaacccagggtttatacctacaaggtccatggctcttcattttcattttatccggatggtgttgcctctgagtgttacgaacagaatttggcaaattctaaatggcccttcacctgcagcggcatacaatgggctaacaggaaaattagggtaaccaagctacagagtctcttcgcccatcatgttttctcatttgacagggggagggcttgtaatgaatttaatcatttcgacaaacctagctgtctacttgcggaagaaatgcgccttttgaccaaaaggtttgataaagcagttattaacagaagcacagtctcttccctcagtacatacatggcttgtcttaaaactgcaaatgcggcttcagctgttgccaagctgaggcagttggagaagagggatctttacccagatgagttgaacttcgtctattcctttggagagcatttcaaaaattttgggatgagagatgactttgatgtgtcagttctacaatgggtcaaagacaaattttgccaggtcatgcctcacttcatcgccgccagtttctttgaaccaacagaatttcatttaaacatgcgcaaattgttgaatgatctggctactaaaggaatagaggttcccctttctgtgatcatcctggacaaagtcaacttcatagagaccagatttcatgccaggatgttcgacatagcacaggcaatcggggtgaacctagatttactggggaaaagatttgattatgaggctgagagtgaagagtacttttcagagaacggttacatctttatgccctctaaatcaaatccagagagaaattggattctaaattccggttcgctgaaaattgactattcaagattggtaagagccaggagatttagattgagaagagatttcctagatcccatatctaaaggaaaatcccctagaaaacaactcttcttggagtcaacgggaaacattaaatcaaatcccaatgctgaaaaaaatagcgagagcggcgaaataaagattgaaggcagtgccgaaaatgatcagccacatgaggtatcacatacttcaatggaaaccgaggatggacagggttttgaaggttcaataccagttgatttaatcaattgctttgaaccagaagaaatcaagcttccaaagagaagaaggaaaaatgattgcgtcttcaaggccatctctgcacacttggggattgactctcaagatttgttgaattttttggtaaatgaagacatatcagatgaattacttgattgcattgaagaggacaaaggactgtcacatgaaatgattgaagaagttttgatcacaaagggtctttcaatggtttatacttctgacttcaaagaaatggcagttcttaatagaaagtatggagtgaatggcaagatgtactgcacaattaaaggcaatcactgcgagctgagttccaaagagtgcttcatcagattattgaaagaaggtggtgaagcgcagatgtcaaatgaaaatctaaatgctgattccttgttcgaccttggaagatttgtgcataatagagacagggctgtcaagctagcaaaatcaatggcaagaggcacaacaggcctcctgaatgaattcgacctagaattctgcaagaacatggtgaccctttcggagttgtttcctgaaaacttttcttctgttgtcgggctaaggcttgggtttgcgggttctggtaaaacgcataaggtgcttcaatggattaattacactccaagtgtcaaaagaatgtttataagtccaaggagaatgctggcggatgaagttgaacctcaactcaagggaacggcctgtcaggtgcatacatgggagactgcacttaaaaaaatcgacggaacttttatggaagtttttgttgatgaaataggtttgtacccacctggataccttacactgctacagatgtgtgctttcagaaagattgttaagggacaaagtgaaaatttcttgaaaggcaaactgttggaattgtcaaagacttgcttaaacataagatgttttggtgatccattgcaattaaggtattactcagctgaagacaccaatctattggacaaaacacatgatattgacctcatgatcaagacgatcaagcacaaatatcttttccaagggtacaggttcggtcagtggtttcaagaactggtgaacatgcccactagagtggatgagtcgaaattctcaaggaagttctttgcagacatttcaagtgtaaaaactgaagattacggactcatcctagttgccaagagagaagataaaggtgtcttcgctggaagagttcctgtagcaacagtgagtgaatctcagggaatgaccattagcaaaagggtgttgatatgtttggaccaaaatctttttgccgggggagccaatgcagccattgttgcaataacaagatcaaaggtcggctttgactttatccttaaagggaattcattgaaagaggtacagaggatggcacaaaagacaatttggcagttcatcattgaagggaagtctattccgatggagaggatagtgaacatgaatcctggagccagcttttatgagagtcctttggatgttggaaattcatcaattcaagacaaagcttctaatgacctgttcataatgccttttataaatttggctgaggaagaagttgacccagaggaagttgttggggacgtaattcaacctgttgagtggttcaaatgtcatgtgcctgtcttcgacacagatccgacgcttgcggagatttttgataaggttgcagcaaaagaaaaaagggaattccagtctgtgctgggtctttcaaatcaatttcttgacatggaaaagaatggatgcaaaatagacatcttgccctttgcgcgacaaaatgtttttccacatcatcaagcgtctgatgatgttactttctgggcaggtgttcaaaaaagaattagaaagtcgaactggagaagggagaaatcgaagtttgaggaatttgaaagccaagggaaagaacttcttcaagaattcatctcaatgctaccgtttgaattcaaagtgaatatcaaggagattgaagatggagagaagagctttttagaaaaaagaaagctaaaatctgagaaaatgtgggcaaatcattcggagagatcagacattgactggaaacttgaccacgcctttctcttcatgaaatcacaatattgcacgaaggaagggaagatgttcaccgaagctaaagctggccaaactttggcctgtttccaacatatagtcctatttagatttggacccatgttgagagcaattgaaagtgcctttttgagaagctgtggagactcatactacatacactccgggaaaaacttcttctgcctggatagctttgtgacaaagaatgcaagtgtctttgatggattttcaattgagtcagactacacggcctttgactcatctcaggaccacgtcatattggcctttgaaatggcactgttacaatacctgggcgtgtcaaaggagtttcagctagattaccttagactgaaattaactctcggatgccgtctcggatcactagcaataatgaggttcacaggagaattttgcactttcttattcaacacatttgccaatatgctgtttactcaattgaagtacaagatagacccaaggaggcataggattttatttgctggggacgatatgtgttccttgagctctctcaaaagaaggagaggggagagagcgacaagattgatgaagagcttttccctaactgcagtagaagaggtgagaaaattcccaatgttttgtggatggtacttaagtccatatggtatcattaaatctccaaaattgctgtgggccaggatcaagatgatgagtgagagacagcttttgaaggaatgtgttgataattacctatttgaggcgatatttgcctacagattaggtgagaggctttacacaattttgaaagaagaggattttgaataccattatcttgtcataagattttttgttagaaattcaaaattgttaacagggttgagcaaaagcttgatatttgaaattggggagggcatcgggtccaaatggctatcgtcaacgtcaaccgcttcctcaaggaggtcgaatctacagacctcaaaattgatgctatctcgtcctcagagctttacaaggatgcaacctttttcaaaccagacgtgcttaattgcatcaaaaggtttgaatcaaacgtcaaggtttcctctcgatctggtgacggcctcgtcctgtctgatttcaaactgcttgatgacaccgaaattgattcaatcaggaagaaaagcaacaagtacaaatacttacactatggagtcatcctggttgggatcaaagcaatgttgccaaactttagaggcatggaagggagagtcattgtatatgatggagcctgcctggatccgaaaagaggccacatttgctcgtatcttttcaagtttgagtctgactgttgctactttggtctcaggccagagcactgtttgtctaccacagacgcaaatttggccaaaaggtttagatttcgtgtggactttgattgtccacaatatgaacaggacactgagttgtttgctcttgacattggagttgcatacagatgcgtcaactctgcaaggtttttggaaaccaaaactggcgattcaggatgggcttcacaggcaatcagcggctgtgaagcacttaaattcaatgaggaaatcaagatggccatcctggatcgcagatccccgctgtttctggaagaaggtgcaccaaacgtgcacattgaaaagagattgttcagaggtgacaaggttagaaggtcacgctcaatttccgctaaaagggggccaaactcaagggtgcaagaaaagagaggatttaggtccctctcggctagaattgaaagatttggaaaaaatgagtttggaagacgtgcttcagcaagcgaggcgccaccgggtaggagtatatctatggaagactcacatagacccggcaaaggaacttctgacggttcctccccctgaaggatttaaggaaggtgaaagctttgagggcaaagagctttaccttcttctttgcaaccattactgtaaatacttgttcggtaatattgctgtctttgggtcatctgataagacccagtttcccgctgttggatttgatacacctccggttcattataatttgacaacgaccccaaaggaaggggagactgacgaaggaaggaaggccagagcgggttcgtctggcgaaaaaacaaaaatttggaggatcgatttgtcaaatgttgttcctgaattgaaaacctttgctgccacttccaggcagaactctttgaacgaatgtacgttcagaaagctttgcgagccatttgccgatttggctcgagaatttctacatgaaaggtggtctaagggattggccaccaatatttacaagaaatggcccaaagctttcgaaaaaagtccatgggtggcctttgattttgccactggtctgaaaatgaatcgtctaacacctgatgagaaacaggtgattgatagaatgaccaaaagactttttcgtactgaaggacaaaaaggggttttcgaggcaggttcggaaagtaacctggaactggagggttag

SEQ ID NO: 1436 - DNA, 5889 bp, Citrus leaf blotch virus, complete genome
  source 1..5889: mol_type = other DNA
atggctttgatgagcaacaaaactgcaattgaatctattttgggtaactttgaaaagaaacacgtcgatgcaatctacaatgccgccgcacaaactatcctctctcactctgaatttaggaataagcattttgcttattcactcaattcttatcaaaagaagatagcctcaaaggtgggtattgaattgtatccaaatggttatttaccacattcccatccattgtcaaaaatttttgagaaccatttgctttttgatgtacttcctggcgtagtaaatactagtagattagttatgtgtagcataaaggagtccaaagttctggtttttaaagggattcgcgacaaatccagaagacaggtttcagacctcaatgccctcaattccttaaataatagtcatacatcattcattaataggttagttgcatccaaagatgtgagtagatatacggaagaagctgatgctttttttcaatccaagaaagggagtccggagctattttcaaggaatttcatcaaaagcttggaaaataaagaggctgttttttttcatgatgaagttcatcactggactaaggcccaaatgttctcatttcttaaaagcacgaaggtcaaaaggttcattttcactgtagtctatccaccagaaattctcaaaaaatttgccaattcccagaacccaaaggtttatgatttcaaagttgataagggtcggctttttttttttccggatggggttaagacagaggcctatgagcagaaattgaatatggagtggctcttttcagcatcacatcttcgcagtggagactgtgtatggactgtaacaagacataagagtatttatgctcatcacctgtttgagatatccattggcgaactagtcacggactcaaaactttttttttccgattataactccattgacatgtctaaaatatttcttgatcgttttcggagttatgaggtattccccatttcgattgagcacctttataaggtctactcttatctgctttgcctcaaaaaacctgacttggagagtggtctagctaaattaaggcaaattattggagatgatgtcgaaatcaaagaattcctcttctttgaacaattttgtaagcgcttaattgaacgccaaacctcttgggggctatttgggcactctttctttgaaaaattaaccgatatggcattgtcatccttgcccaactctatagcccgaatttttcctcaatggaaaaaaaaaaacacatttgagttccttttctcacttgggactcttgttgtggatgtggagagaaaggtgtgttttgaacatgtgcttgaggaatggggatttgaagttgttatcactgatgaaaatgcctatcttgatccactatctatctttgctatcaatgaaaattttaatgaggatagagtggacgatggttatttggaaagaatccgtcttcccttctggaatctgaatgactatgacttgaaaagaaagagggtaaatgcgtataacattctctcttatcgatttgaagaggagcgaaaaattgaatcagcgcaaaaaggtccaaataagatgctccagattgagtggtacgggattaaagaatttaaagttgacccttttatcagcaactccataactgaatttactcttttagaagcattgctgggaaagaggatagatccaaaaaaatactcatattcaaagcaagcctgcactctttccaactatctcacatttttgtgtgctgagggtttggatggattcaatttggaagagcaccttgaacgaaggttgaaagcggccggtcatgacgtttcagatgacgaggaggaagaattgacttcagctgaacaagcggggcctatcaagatattggctgatccacttggttttatgaaagagtgtttggaggagatcccaatcgaaactgaaccatcactggaagaaagagggcagttttccactgattatcattctgagaaatttgaaatcaattacaatgacatttttaatcctcacaattgcatgaacactcacggcgatgaaattcccacaccgtcagatggcaattgttttttttcagcatttactgaaacttttgaagttgaaagacctgacaccttgaggtctgatttctcagactggcttatggaatttaatggggggtcctatgcttcacttgcagaaatgatcagaccgaatggagtttttatggaggcagaactcatatacttgttttgtgtatttagaggagtcacgttgattattcatgatagaactcatgaaaaagagaatgtttatgctgtacaccgcgggtttgaggagggccatatggtacatagaggcaatcattttgtcgggattgaaacttacaatattagtactttaacctcagaccccttacttggtgacatcccatgcggtttttcagaggaaattacaaaattccattttcggcctgatcatttcaactgtgcccagttcagaggaaggaaggcggcttttatcaccaaagttgatgcagattacgggcacaacggtatggtttacccccacaattcatgggtaccttctttagaagagatcattcagatctgtggtcagggagatgatttcaattgtgcattaataaatttctatgaggcaaactcatctcttgggttccatagggataatgaacgggtgtacaatgatgatcctattttgaccgtctgcacattcggtgaaggtagattcaccattgaatttaaggatcaggtaacttcttttctaatgactgctggctctttctttttaatgcctaaagggttccagaagaaggcaagacactctgtctcaaatgaaatgtcgagagtctcgattactttcaggaagcatgttagaaggttgaatgggtcaccgattgccatcagggaagaaaattacaaaaatacatgcctcattaatgccttttcaaaagcaatgaaaaggagcaaacaggcaatcattgcaaaactgaagactgttaatagccctttctggagtagatacctatctgagggtaacggtggctccattgaagattgtcaatcggcctgtgaggcactggatgttactgtcgaccttaatgtaaatggaaaatgtgtggttcttggaaaaggggctttaagaatctcaatggctttaagaaacaaccatttttcagttatcaatgctgcacaactgatggagaggacttttgttagccacttgcttgaaaaaggaaatgtcaatgtgttagaaggatttgacgcaatgctaagtggtgatgtgggcgcagcaggtgttaacaaaattcaatttgcagccaattttgaatttgctagaattttggcaaattcatttctaaatatgacaactggcatctgcctgggcaaggcattggataatggggaaaagtattttctccacattttgaaagatagagtgaaacagattggtatagacgtcacaatggtgtgcggatttgctggatcggggaaaagtcgcaaactgcagtcctggctgcattcaaggaaaaaagggaacttctgtgtggtttccccaagaacaaacttagccgctgactgggcattcaagttagaattagagcccaatgaacagagaaaggtttcaacatttgaaaaattcatcaaaactgataaaagcaaattagatctcatagttattgatgaattgacattgtttccaaatggttacctggatctcctcgtgtatgaattggctgatgtcaataggcattgtcaaatcatccttctgtttgatccattgcaagcaagataccacaacaaaatggatgaatcaatcctgacatttgaacatgacgtggacaggcttattggtggacagaacattgagtacatttacagcacgcatcggatgtccagatacttcaatagattttttgatgtaccttgcttcaatcaggctgatagaacagaggaacaaaggttgtggatatttgatgacgtttactccataccatccatttgctccgaccgtcaggaaccatgtgatgttcttttggttgaatctgaccttgaaaagaaggcattttcacccatcataaatgttatgacatttggtgaatcccagggactcacatttaatcatgtttgtattttgctgtcagagtccagtgcagcttcaaacgaatttagatggatggtggcgctgacgagagcaaggaccaggttttcactctgttcaaccttcttaggtggaattgaagaatttaaagtcaaaaggaaggaaagtctcatcacatccatactccaaggcgagaagatcacattcaacagattaaatctgatgctgaaatgcaatttaattaggagagaaaaagaaaatgggtgcagagatgaggtcgatagggaggaaaggttggagggtgaccctttcctcaaaccatttatcttcttgggacaaagagttgagaaggatgaagatgaggtagaagaagtgaagatcagggaaccaacctgtcaaactcatctgtatataacagagcctaattttggtttgtgctacaatttcgacttcattagggaaaaagaacagcgggaatacagagaggatatgcttgtaactaaccaattctgtgacagttatgataaggttcatataaacggcaaaagagaaacccctggtcccctgcgattcaaagcgatttatccaaagcactcagccgatgatgacatgacgttctggatggccgtcagaaaaaggcttgtatttagagaagaggaggagaattatcaaaggttgtcaagggcgcatttagttgggggtttgctatacaccaacttcaaaaaaaaaatgggcctggaatttacgtttgaccaaggtctactggaggaaagcataaatgcatttgaaaagaaaaagctggaaaaatcatgtggcacaattaaatctcatagcataaggtcggacattgattgggcgctgaatgatgtatttcttttcatgaaaagccagttatgcaccaagtacgaaaaacaatttgttgatgctaaagcgggtcaaactcttgcctgttttcagcacctgattttggtacagttcgctccatggtgtagatacctagaaacccagatcagaaatcagttgcctgaagaaatttacattcactcaaataaaaattttgatgatttgaatgcatgggtcaaaaaatttttccagagggatatctgtgttgagtctgattatgaagcatttgatgcaagccaggatgaatacatattatccttcgagattcatctgatgaaagatgcgcattttccgcagaaaatcattgatgcatacatagaccttaaatgcaaattgggatgcaaattgggccatttttcaataatgagatttacaggggaattttgcaccttcctattcaacacactggccaatatggcattcactatgtgtagatacgaatggaggagaggacaaccaattgcattcgcaggagatgatatgtgtgcattaaacaatttggctgtttgtcatgatttcgatgacctttttgaactcatcagcctaaaagctaaggtggaaaggacagaaaccccaatgttttgtggatggagactaactccatatgggattgtgaaggagcctgaattagtctataatcgctttcaagtggccattgaagagggaaaggtcttggagtgtctggaaaattatgcaatcgaggtttcttatgcctacagtttaagtgagaggctgtatgaagttttgaaaagtgaaaggcaagttcagtatcatcaagctgtggttagatttatagtcacgcacattgacaaactcaaaacaaaagtgagggaccttttcttagaacaatcttccgacgaagatatctga

SEQ ID NO: 1437 - DNA, 2127 bp, Apple latent spherical virus segment 1
  source 1..2127: mol_type = other DNA
ggacccgagcaaatgtatataccaactgctcgatctgaatcctttggatcagtctgtcttcttgggaaatggactggccctaagccttattttttagagaatagttctttaactccctctctaattcatgactgtatagatatagacatgacaacggagcctgctattctttctaagaaagatcccagacttcaatacactaacaataaagattttgatccttttctctcaggtatgggaaagtatgctgttgaggctcactcctttgatgaagatgaagaattgtttgaggatgctctagatcgagttttctcagagatacctatgtttacctgtgaagatttatctaatgatcaggtatgcaatggtatagaggacgatgattatgctgaaggattggttatgcagactgctgaaggttaccccttctgcactatgcggcccccaggagtcacaggaaagacgtggctttttgcgggatcaccaggtgattggcacatagtccccaattctcttcttgctaacgaacttaatgtcaaagagttgaaccttagcaagaatatttttgaaccagtgataggtatagattttcccaaggatgagaaagttgattcttctaaagtgtacataaaacaaaaaactcgactttttactatcctacctgttgattataatattttagttaggaaatattttctttcttttgtttcacaacttatggccctccataatgaagttcctacaaaggtaggtattgatccaatttctaatgaatggtctattctttgtcattctcttcactcaaaaggaaccaattggttcaacggagattattccagatttgatggaataacacctcgtaatgtgcttcagggcattgtgaagagaatttcgcgtagatatgctaacaagagttcttttgctataacagatcctacactttctatcaatggtgatcttgctagatcccttttgatggatatgtgtagcactcgatatgggctaactaatggggacctttggtatgtcacttctggtataccttcaggatttcccttaaccgttatagttaattctttagttaattctttctttgtgcactttgcttatatgaagcttcattcttctgaagtgcacaaggctttgtatcctctttattcttttagaacccttgtatcatatgctgtttatggggatgataatctaatttctgtacatgacacaattaaagatacttttaatttagttactatatctaacttattgttggagcatggtgtgactcttaagaatggagccgataaaaatgaggaaattttatctccattctatcctatagagaaggtggattttctcaagagacgattcaccactttacaaggacatattgttgctccacttaacactgttaatataactgagcgcttgcactgggttcgtaagggcctaggtgatgctgatgccacacttgagaactgtaaatcagctctctttgaagctttatttcatggagagctgtattacaatgatcttcgaggcaaaattgaaaaagcttgtaaagtgaagggccttcctttgatagtcccagattaccaagacgctctttctttatttttaactggaggctcatatgctaaggctattcaggctatagcgatgaatctccctgatagaatctctctgtacaaatctgaattctatagtgtacaaatatatcctcaaattttttatgtgaccaatgagagaaatgtcacacttcagaaattgctggagaccactactctccgtaacatttgttatgtttctaggaactacgagtctaggagcagttctaggggtcttttcactcttaagggtgaaggttggactccagctgctttgaaagctcgtcttagtgtgtacaaagctatggccaaacctgtttacttcgtagatgaggctaatgatggtttggctatgttttattgcttagattatgcttttcgtgtttgtggtttaacccggagtcaaattgcaaaaattcttaatgcagtttttggtggtaaccccgaagtctgccaaagaattttccaatttttctctcaagtcgagccaaccaataagtacattcctcccaatcaaaggagg

SEQ ID NO: 1438 - DNA, 6588 bp, Soybean latent spherical virus isolate ND1
  source 1..6588: mol_type = other DNA
atgtctttccattgtccaagttctacttgccttggttacactcaatctttctctcgccgtgatatgcgagagcaaggggatcgttgtccccatgctatgtgtggtgctcttctagtgaagaaggtgcccactttatccccacagggtgccagacctgtggtatcaaagaccactgttgtggtccctcctcaagccactgaggaggttttgtattatgggtgtgcccccagacccgcttttcttgaagcggttttggcggccccaaaattaaagatggctccaccagtggtggatgcgatggaagtcgcatacctccgtggtgttgcagccatggaagctgaggagaagaaactcctcaggaaagaaaaggctgcagttgtggcccgtgctaaggcacggcgagctgcaaggaaggcagccaagaagcaagttgccgagatgaaggcaactgtggccctgaaattggccacaaggcaaaaaactgcacgtttgagtgcagctaagagggccatgaaggccaaaagaaaggcagccaaggaggctgccaggttggcgcttgaagagcgccgtgctgcgggtttaacccgcaaatcggccttcaggcgtagcctgaaaaagaaagccactaagatggctggtaggaaggtccctaagacctccacttccacctttcccaaggtggaatctttttcttgttttccttcttctcccctccctgcttttattagggaggaacagccctgggtggctgtgaataccccctgccctcatcctgagggcttcgatttggcggttgatcccgcctttgtggctcctattgtggggccaatcgttagtgtgccatttatggcacctgttgtgaaggcttttaatagccttgtagaaattttggcggctatcaattatgaggccgctgtagatttaagagcctacattttagaaatagcttcttacgaaaatttctttgctttacggagaatttttgttggaaaagctttatcttggatggctcttatcctacctctttatccctatgcgggcatctttgatacttatctcccacttgatatggtggaagataagaattgtgatgcttatttagcctcattacagcagactgcagtgatggtgctggaagtgacccagggaccaatggacgcacattctatctttgatatagtgcgttccgttggttctaaggttgctagcataaaggacaaggtagtgggatgtatagttgagaaatctgctgccctgttggacactgttatagacacagcaaagggcatgttttttggagttcttggcccataccttgcccgcgcacagaagatcggagaggaaattaaaaaattctgggataactgtgtcgagtgggcaacaaaattgtggcaaggagctcatatagcattacaagctcttggcatttatgctgtttgggctatagttgctatggtgcttgtaggagtaatgtatatattagaaacaattttgatttgtttaggtgtaatgagtggtcatggtgtccttgttgttgctttgacaggggcagtcatgacttttttaggttttactgtttttcagatggggcgtgagtatatacattttttgaccgccctacgtcaaatcattttcttagcagttattccccaaggaggattgactcaagttaatatcatggattcgtccgttgatgttactgagccacactccttgttagatactgctatggcaccagttcattttttggaaactgttgccagtggtttaacattcttttcttctacctctgttacagtcttaggtaaattaggaaattctctggagggaattcgcaaaggttttaattgcctacgcgattttacttccgttttgttagaacaatttggaaatgcttttgaatacatttccggtaagagaacgtctttcttccgtgatcttgcgtgtgcagttaaagtagatatcgctcgatggacccaggatgcacgggaaaccattgagtattttgaaatttcaggttcccttgataggtatgagtattatcgtgctcgtgagcttatctatcaaggtcaagatttgatcgacaccgccaacaaagctcgtagttcgcacacaagtgtaaaattcttgcgaactattggcaagttggttgaggaactaaaagaaattcgtgctaagtgtgcacgaagtttaaaattcccaggatggcgtcgacagcctttttgggtatattgttttggtgagagtcaatgtggcaaatctactttggcaaattatttgatgccattgttgatgtctcacatgggttgggatcctcaggatgtttacagcaaggatcccgttgatggttactggtccggatattatcagcagaagggtttaaagataaatgatttatctgctgttaattccaaagatgtagcgcccctcgagcagcagttgataccattgatatccactgaggagaaaatggtgtcttcggctgaaattgaaggaaaaggaatgcagtttgcctctgaaattgtagtttcttcatccaattttaatgatgcaccaactggtgctgaaattttggatgcagatgcttacagacagagacgaaaggttttgatgcgctgcagaagggctgctgagtgggttcataatgctgatggtacgcgcacagagaagcttgatgctgagggcaaaattgtatataagccctatgatccatccaatgctttatcttgtaccgaggtgcaatggattcatcctgtttcatttacagctcttcccggaccctgtgggcagtggcacttagccgagttcaccatacctatggtgaaggaggctatggatgcccactttttgcaagaagaaacaaagatggcatcctggaagtcgagccttggcatgaagagtcaaacagcaaggaaaatgggttcatacttgcaggatatgattaagggtattggtaattttgttacccttaaaggagcaaaagattcagatcctcgttatttgctggtagctgttgatggaaaatgctatgcgttagaccagcaagggaaagccactccttatgaggattgtgatgttgttgaagaaattgagcggctaactttgttgcaataccgctcttatttcgcggacttggtaatggaacatgctgacaatacatattatcaagattcattccattcatcaacagtccgagattttttgttggctctaatgaaagatgggtcaactgttttgtctgtggatagtctgggtagtagtactcaggacattcacaaagaattatgggcagaattgggactttcagaaaagatttttctgagggtttcacaaatagctcgtaatcaattgcgcgatgctccacattttaaggaagacgttgcgcacaattttttggaaactatgaggcatcttagggatgctattgtagatagaaaggaacaaattcttttattttttgcagcagtagctttagtgggcttgtttagttggggttttttgagcctaattaaacaatttgcttgtggttctttaggatttggtgctggcatcgcattgcgtgagcaaattgctcatagtagtgttatgtcttcaggtagtgtgactagtgcctttgttgcacgcaacatgccagttgtatggggcaaagctgctaggtatgccactgcacactcaagcaaagaagaagtgggcgccaattttgattattttgaagatgctagtgctcatttgttagctcgtgttgttggctcatctggtcagtctgagacctgccttttatttggtcatcaggctattgcactttgtgcgcaccagttgagattgtttcctgacaatgacagggtgactatccattatttttcaaaggagaggcgccctgtttgtttttcatttacttggcattatattaatgctattgagtggcctgactgtgaagtaattgtatatagagatgcacagctcacgccactccctgtatatagtgatgataattatttgtgtggggagcaaacattgcccacagttttaacgataactgggctctcaattaagaagaagaaattctttgatgattccacgttgtgcccaagcgaaaaaattctggacggtgaaatgcccatcgtccggagctggaaagataccgcttctctgagaacgcaagtccagacaattttgtccgagactcatagaagagatataaataggtattatacttctagttacccatcagggaaacatgatagtggaggtataataactgcagttataaatgggaagcgtaaagtgataggcatgcactgtgcgggggcgcaaaatgggaaaatttatgttagtaccattggtcttttgcccacccgcaacattaatgatgcacactctgctgccgattattttgttccaagtattggcagggaggaaaaaggattttgcaagattggttggattgcagatccttcaaagagaccacatgctgccactaagactgcattggcaccagttcctaaggaattggctttgccattgccagagggagtgtctgtaaagattccttctattttaagtgcagcagatccacgcctgcgtgatgaggtgaatcctgaatttaaggattatgatcctctacgcgtaggtatggataaatttgccaaccccatggatccgcttgatgatgaagttttacagcgggtctgtgaagatatttatgaaacctggtatgactgtttaccaatactagatgatgagaaggtcttcttgcaaaagacctccttggaggtggcgttgaacggtataccgggtgaggcttgctatgaagccatgaggttggatacatctgagggttatccttttgttttagaaaggaaaccaggggagagcggcaaactcagttatgtacatattgatgagaatggcgttcgttcccttattcctggtacatcggtttttagagattaccatgaattgtcagcaagtatactgacccaagtgcctgtgttgaattgcattgaatgtcctaaagatgagttgctaaaaccatctaaagttttggagaaaccaggcacacggcttttcgatgtactcccctttacacataatattcttttgagggagtattttttaaatttttgtgtttttctccaacaaaatagggtgcatttgccctgttctgttggtgttaatccatattctcgcgagtggacctggctttttgataggttggctgcgaagagtgataaagctttgaattgtgattatagtaaatttgatgggcttatatcacatcaagtctacatgcacatggttgcaaccattaaccgactctttagagatggtgaggaagcaaattgtgcgcgtaagaacttgtttttaatgtttacatcacgcaggagcatctgctatgatcaggtttatatggtcaaaggtggaatgccttctggatgcgcactcactgtaattattaattcaattttgaatgaaattttagtgcgctatgtctatagaataaccgtcccaatgccagccaaaaactattttaataaatacgttgaattggtggtatatggtgatgataatttaattgccatacatgatgatgtggtctctttttttgatgggcccattattaaggaaaaattggcagaggttggggtgaccattacggatggtactgataaatcatcacccaccttgttacgcaaaccgctggagtctcttgattttttgaagaggggctttaggaaaattgaagggggaatgtattcttgccctctggataaagggtccctttactcccggttatattacagtgctggaggtaaagggggcctttttcaacttgatatcctccacgataatgttaaatctttcttggaggaactgacgcatcatgctgatcattatgaagagtttcaaagagtgcgcagtttttatattaagcgtattccttcatggtcagctacgctgcctacctatgctacatgtctgaatatgatggaggggcagcggaattcagcaacaccctggcaaccacataaatttatagaaacgcggccttcaggttgcgaaactaaaatgatggcgggccaggataatcatgctcagaagatatgtgtaactgagcgtataattatatgtggtgaaaaatatacgccaccaatactggagacctcttttgttgtttcaatagacaaccccctttatattggtgaaaggggggagtatgttaaaacagagtttggttcaggtatggggcgactgcctactgatgcctggatcaaagctttctccagtcccaagaagcacccacagctttttgaagcttataagatgggtgctactatatattttagatcctgcatgccctatttaaatgcatggtgtgcagtgtgtaagtttgcattggctcatggaatcgatcagagttctattattgctatgtatgagtcatgcaaaccaagaggggcgggcgacattgctcctcttgtggccgtaaaggcatacactaaatttgtgaacagaccagtgtttaaatttaaagagactgttcataaggaagtgctcgaagcacacaatagtgtgcgagtcgcctaa

SEQ ID NO: 1439 - DNA, 19296 bp, Citrus tristeza virus
  source 1..19296: mol_type = other DNA
aatttcacaaattcaacctgttcgcccagaaaatacgtctggcacaacagggatccggaataggtccagcctttaagctctaatattcccacaacaaaaattacactatgtcgaaactcagaggaagcttctggtcttcggccatcgctgttaacagcgattacacgatatcgcgcatctggcgcaaacttaacaccatagtagtcctgcactactttggttttgttagaatcaccaaggtgattcgtgacaaatcggctgatatgccgatagtccctttacggaaatctgtatttccgttttctgttcgcgcggctgtcacgagcttcgtgctgctgggcgtcctcttgacgctccgcattcagggtgcctctgtggccttcccgttatcaacgcatctggcgttgttcgtccccgctctgttcgcgggtttttcgaggttttctctgtgcaaacctccgctcacctctgccgctaagaggtccctccgtcaggcaaagcgggaatctgtttccctttctagccgggcctcttctcgcttctctagggaagtccctcgcggcacacgttcaagacttcacagacgtgtggtgagacgagctgacactgccccagttgagagtccccaagacaagcctacccgacgaaacagccgacttggtaagacttctcacctcccttacgtgggggaggcagcgttggatgatatccttcgctggatcgaagaggttaatcctcatccctcgatggtcgctattccagtgcccatcacttttggaaccatgcctgcaacggcttggtgttcccactctgaagccgcagttttgcgtgccgccttgactatcacgcggctgaaactgatttctccactcaggagaaacacgtacggtacgtctataatgacgtatcttctgccactaaccgtccccgtacggtttctccccgcaagtgcgtccatttttcccagtaaatctaaactgggcgttgaggtcccctctggtagggaccttcacactgcgttcgtgagatcttctcacgcgagcgctttcttctctgacgcggttcgcgcttcgtttgttccgtccagcgcggaacaattttttcacttccgtcgtcagcggacgcatgttcttgctattacagacccggtcctgtgtggtacggtgtctgttttaatgtcggacggtgttaacacagcacgtctcgacgttgttgctccggcgtactatgcgtacgctgaatctttgggcgccagagtgcgctttttgtgggagtcgtccgacgtggacgacgctaaagttcgtgacggtcaatgttatgtccgtcatgtgttcgacgtggctctctactttgggagacgcgccgacctttccgtgcgtagagcgctgggtatgtaccccacagtgggtgcactaaaggcttatcttgttcgcgaatacggtcgcgactctcttaaggttcctatgcgtgggacctacacttttggcagtgtgtttcactgcttgtcgctaaatcttcaagtcgacctgcgatctattcctaaccatcatttagttggtgggacgtctgcccacgtcttaattgggcaggttcgagtcagtgttcctggctcgattgttaaaccttcacgttcggccgttcgtaggcgtaatagacgcatgcgacgtgatggttttctcggtagttccggttcttcttcttctgcgggggagtcgactcgctgttcggactgctcttctcctcgcggtttaccttctccttccgttttaaaaccttccctaggtcggatcccgagtatagatcggcggttccggtttcctgcgggtacgcagttgcgcgtctccgtacctaggcgggtcgatgaccatgtttacgtgtcgactggtagcaacttcgatgagttgtgccatgcagttttgacacgtatgtcaaaaggtacaactctagaaatccttttacactcgattcgagagcggaagggactacttggttttgcggcgtgcttccgttgggggtcttcacacgtgtttgtaaagcgtggcaactttactgcccgatttcctatttcggcggtcaggtatgagaatcagtatgccgcggttatgatggatgtggggactagttgggttccgaagggctacgttcccgatgttgatgttgtgaaacgtcggagaagtcgtaatcgtcgttttcctctttcccatcgtgcggtggatcagtcggtccccgcgttacagtcgagtcctgtcgaggttgcttcggtttcgagtgataagccttcatcgtcgcagaaggcttcttcaccttctacttcttcttcttcttcttttaactcgacaaggagttcagactgggtgaatgtcggtttctctcatcgaactactaataaggttcgtgaaccgcgttatgctggtcatcgtaggatcggaaattttactttcccgaggggcacagtgtacaacacgcctgtcgatgagcgcgcctataaacgtgttcttagattgcgagataccacagcctgttcctttctccgtatactgctagctcgtttgtcgggttacagacctttaagtgacgagttctttaacaagtgtgtcacttcccggtttgtcgcgtgcattgaacctgtggaatcaggtctcgttaaggtgcatttccgttctgatgttttccgtgcctctttcccgtttgacggtcaacctatacaccccgccacggctttgacattggaagtggtggtctcttgggattggatggttacggcttttcagaatcccttgaaggatggatattgctacattcgccatttcgccgaagttagtttgagcatggggcgaattttcttcaggagggacgtcgacttgggacctttcccatacgttttcgaagtgcaacaccgtcttgaaaggttgtacgggaaagctgcgttaagatacggtgttaggggtcaatattcagccccgcgctgttttcactgttgctacaacgattcaccgagaccgatggcgtcctttaatgggtaccataagatgggtggtgaagataactccctgataatcacagacaccgacaggttgcgtgctgtggggagtgcctatgaaaaagtgaagagaaacataccagattcgttattggttcggtctgtagaaaaggaccttatagagtttaatcagactctagtcgacatgcatcgatccagaccgggcgttgtcgtacctttccaaatgagtgagaatcagcaagtgatgcttactagggcgtacccggaatttaatattaattttattcattccgtacattccgatcatccggtggcagcaggttctagggcgttggagaatcatctcgttcgtaaacacgctggtaccgattattcggatgtggggggttgtccgctgtttcatttacgtgcgggtcactccggcgttcacgtttgtagaccggtgtacgatgttaaagacgctcatcgtagagtagtccgtcatcaccaacttagtaaggtttcgctagatcagagtgacggtgttaaacaagttggctggaccgtaaacacgaattctgtatgcggtaacattttgggagagtgttatcatgcatcggaggcgatggttatggttcaagtttatgacgtaccgctacgtgagttgtgtagggctatgataaacaagaaaacttccgtgtgttatatgaccatggttacacctggtgagttgttggacgcccgcgagtccttttttattaaggacttggattgttcggttgagttagatcccattgcagacagggttgtttactgtttcaacaattctgcgtatacacacacgtactccactatatgtgagtgtatgcgaactccttgcttggtagtggacgggtttttgtttactatcgaaatggtatcgctcaggtgtagcgttaattactattgtatcaccaagtcgtcggtctgtccgagaattagtgagactaagcggttgcgctaccgtcggtgtgatagcgacttgattagaatcaaaattccccggtactccagtaagactcgtagttgtttacctgggtgttactatttgtacttggacgccaagtttgtaagtcgcgtgtacgagtacgtggtcaataactgcgttgtggtgaacgcgaaaacttttgagtggacttggaattacatcaaatcttgcaagtcgagagtggtgatcagcgggaagattatacaccgagacgaaccaatcgctttagagtacttagatgggttttctgcggttatgctgtccgctggcgtgaagggtaggcaaaacgcggacgtttctagacgcttagccgctttttcgggtgaaacttcgattttcgagttagtggggtttgctatatccgagaagtgccgcgacttgttcttgggtattcaggacgctgtggaaagatgcgtgaagtcgtacctcaggaattcgtttaatatgagtttcgtggacttgtccgaccccttacttacgattagcgaatattcagaattggacgttcctatcgacttaccgggtttcggtggaatagtggacggtaacgaaactagacttatggaagacggtgttaaatcggctttattacgtaaagcggttcaagccgaggctcagttgagtcttaagagaggcaatacttccgaaatcgttccgtgtgatgacgatgacgactcgaacggtgatgattcgcgtgtttcgctcgatacggactggtggttcgtccttcggggtggtagttctggcgggttgcgagctggagccgccccttctttgtttaggtgtttactcaggaaattgggtgggggtttatgtttggcaaagaaagtgttggaactgttagtcaagcgggtggttgaatcgttttctcgtttgaagcggaaaaccgctcgtttaacgtccttcgctaatttgttgcttgcgaggctctcttgcgggtttttcgatgacactgttttttctgcggtctgggaaatagcgatcaacctgaccaggatcgtcgatggagtagtcaagacaaaactggggtgctttcgtaatttatttcgattgattcccaagttatacgctggttgtaaggacgttgtgaaggacgttagtaacgcttacaggtcggttgtctcgttttccgctgaggttttgggtaagagttactctaaactttgtcagttttgcttggaaatatttgacatcgggcttattgaggtttctgctcgtaatttgggactggaaacatgcgtttcaatagcactagctatttttgatgtgttgattacttttcctttggggagcgttagttttcccgtcgtttgcgctagggttttcggtcgtctcgctatggaagtgggatcgaactttttgtttaagaaagttttcggtaaacccgaaactcttggtgaagatactttccgtaggactgtgagtatggttttgaggcccaaagcgtttgacaagctttccgtggatgcgaaaggtttagttaggtgctctggtgttattcctggagtgttaaggataatactatcttccttgttttccgaagatgacgcttgggtgggttatagtaaacatgaagtttcttcccttcctattgttaccttttgtgtgaagagattgtcttattctctggagcggtgtaaggaagcgtgtgtcgcatttattgttgactctgctaagaagattttgaaatctttaacttcagagttcaacgaatccattcaaaactccgacttgaccagtggtgctaagtccttgtacgggcacgtgagctcgatactttacacctctagtggtgtgattaataaagcaggaagcgccgtcgctactgttaaagcggtcgggagtgatatcagtggtcgtgtgaaacgtatgcgaccccgattttctctgtcccgtcactttgacgagcagactagtgagtactactctgctagcgattgttccgaactagatgagtcgttgtttagtgaaacgcctggtcttcgtggaaacgccaggtgtagagatttgtttcgtatcgtgtctagacgcgcggtagcgtgttgtgagtacgtgacaattcttttgaaacggctagcgtcgcgtgccggtgaatactcctactcgtatgtgatggatacgctcgtgagattgtatgtggcgaccgatgatgttgttagacggtgcaggtcctttacgttcgactgtactgataaagcatctaatttcgtcaccgggtttcttagttggcgcagcttacgttctggtgcgtactctgcaactccagggttgggtggtggtagtagaggtttaacgtcgttttctcacaccggtggattcacgcgcgttatcggcgctcttgggaacaccttatcggtggtgtttgatgaggaattcttcagaactttgctgcatcggttgagggcagatgttgtggttttactggtggagttcttgaaaaaccttcccgtttgtttgttttcaatatacacttttattgaatgtcggggtaggatctttcctttaagagagttcctatggggtttttgtcgtttcgtttgggatgttatcgaggggttgtccatcaatacttatcaatacctctctgctgtcgctgagaaagtgtatcgaggtgcctttaatcgtcgatttaacgaagaggatgagaggacgcttcgagtgatcacggaagcagagggaagaatcgaatttttgcgagttgttctcgcggaaatggaaaggttccgtgctgcgtcgaacgaggtttcttcgtcgaggtcgtctgatagtccttcattcccacctacttacggtgaaattgaggagttaaatgatgattcctccgatagtgcgctagtgataggcgtcgacaacggtaccggccgcactatcgttgacggtgagaccgattctgcgtccggtagcgatagtgacgtttctatcccgttggatcgcgattttgaacaaatcgggcgtcttggcggaaacggtaacgtcgatgtcgttcggctgggtttgaaattcgttctgaagttgttacgcaacctattcgatgctagaagttttaaagtgttgtatgggttgttacttcaaacccttttttatggtggttcggtaaataaatttgtgtgtcgtctggtctttagtcttgggacttgcttacctttcgagttactccgatttgcgtgttcagcgaggcggttgttgaagagtttggcatcatttgtttaccagactaaccttttcagcgaagttatggtggagcatttgtttagcgtttcccgactgctttatgattcccggtacttcgcgactgtgttttcggaattggagagacttaacttctatttagactatttcctttcgctcccgaagagatatctattccctaattctagggctcgtagttgtgctagggttccggttcccgtgattaggaccgaaggagtggcaccagtccgtgagagatcactaaatgacatactggactctttagactctttaaaggtgtcggacctcaaagggaagtcgacgttcgttgatgatggggagtcggattccggtagtgaacattcgggtagttcgatttcgttcggttccgtcaacgaagaagttttaaatgcggtaaatggtgacagcgtttgcgaaaaagccccgttgatgaagcatgttaccgcacttagcaggttggaacgccaccctagtggtcgtaaagacattcctgtttctaggaaaacttttgtgcgtggtgaatcttcgggtgtgaaatcgaaggtgagtatgtgcgattacttggtgaccttgaattcttcgtttggcacagtgcctgacatgtaccctgttgcgcgtgacataacgtataagaaactgactaacgccatgcgcgaattctattactcgcaaaaaataaccttgtacgaacttcacgggaagttgagttcctattgggacgagttgaaggtcgcaggtttcgatagaaagttaacgagaatggatttggacgatgatgtctatgttgttgactttaatcggaaattgttggtggggagaaacggatctcatccgtttcgtaatacgttaaagtcctattgttttatgttttgtaacgatgggttggttccttgcccgcgttctcagaaatatgattatgctttgatttctaatcaaacgtcttttgttgccgcgaattcgttcttacgtgccgtggatggtaaggatttgacttttaccaatgaggaacatagccttatcgtttatgaagctcctcccggtggtggtaagactcattctttggtgaattcgtacgcggattattgcgttaaagtatcttgtttagtagtgaccgctaacaagaattctcaaaccgagatatctcagcgcatatctaatgaattgatgggcaggaagctagctgctaagtatgttaccgatgcagcttccagagtgttcactgtagattcttacttaatgaatcacttgcgacttacgactcaactgctgtttatcgacgagtgcttcatggttcatgctggggcaattggagccgtggttgagttcacgtcttgtaaagcggtggttttctttggtgatagtaagcaaatccattacattcaccgaaacgatctcggggtttcctttgttgcagatattgatgcgtttattcaaccggaacatcgtatttacggcgaagtgtcctataggtgtccttgggacatttgcgagtggctttccgagttttacccgcgacacgtagctactgctaatgtagggagtattgggaagtcgagtgtgtcaatagaggaaatcaatgggtgcgatgacgtaccttacgacaaggcggcgaagtacattgtgtacactcaggctgaaaagaacgatttgcaaaaacacctcggtcgcttaaccgtgggtcggaacaaggtagtaccaattgtaaataccgttcatgaggtacaaggagagacctataaaagggtacgtctggtgaggtttaagtatcaggaggataccccgttctcttcaaagaatcatattgtggttgctttgactagacatgttgattctttggtttattccgtacttactagtaggaggtacgacgatactgcgactaacatagatagggcgaaggaaatttttgacaaatttcgttcgtcgaatcactcgtacggttcgtcatcgttagagtggtaccttgaaaagtatcctaccgaatataagggtagtaaagcatcctctgctccgataagttgcattaacgaatttcttaatgaggtcgtcgttggttcttctgtcgtgcagttgggtgatgtgtctgaagaactaagttcacgtccctttgaatcgggttgtgataatgttactgtaagagacaccgcccctcctgactcgggtaacttacacgaaccggctcgcgttcggcgtagtaaggtcacaagcaattcctccaagaaaagcgtcactgcaagaaaaccttctgtcgtacgaaagtcgtaattataactttatcaagacggaacggtttgttggaccaagcgaatttggtagggcgatggctgctgctgttatcgaacgttgtttcaaaatggaagagatggctaagataaggtgtgatattatatcccttactgaagctaacattttaaaatggctcgataagcgcactccctgtcaaataaaggccgtacacggggagttgaaacttcccttttcggtggaggagcaaatttccaacttcaaactgatggttaaacgtgatgctaaggtaaaacttgacgattcaagtctatctaaacatcccgctgctcagaacatcatgtttcataagaagtttatcaatgccatattttccccgtgtttcgacgagttcaaaaatagagtgttgtcctcgcttaatgacaatatcgtgttctttactgagatgacgaacgctgggttagcggaaattatcagaagaatcattggtgacgacgacaacttatttgttggggaagtggatttcagtaagttcgataagtctcaggatttgttcattaaagagtacgaacgtacgttgtattccgagtttgggttcgataccgaacttctcgatgtgtggatggaaggtgagtatcgcgctagagccaccacgctggacggtcagctgagtttttcagttgatggtcagcgtcgttctggaggttcaaacacttggattgggaattccttggttactctaggtatcctttcgttatattacgacgtttcgaagtttgacttactcctcgtttctggagacgattctttaatttattcgagtgaaaagataagcaacttttcttccgaaatttgcttagaaacaggttttgagactaagtttatgtctccgagcgtgccatatttttgctcaaagtttgtggttcagaccggtaacaaaacgtgttttgtgcctgacccttataaattattagtaaagttgggggctccacaaaataagttaaccgatgtcgagttatttgagttgttcacttcttttaaggacatgacgcaggactttggtgatcaagtggttttggagaagctgaagttgctagtcgaagctaagtacggtttcgctagtgggaccactatgccagcattgtgcgctattcattgtgtgcgatcgaactttctgtcctttgagaggttatttcctttcattaggggttggtatgttgttgacgctctaaaactcagacagcttaggaaactcactaatttgatctgtgaacgtgtagtttacgacaatcgggtgagttatttttcgtacttcgataacccgttcactaaacctgacgctaacgacgataacgtggacgacctcggacaagcgggtgaattagcaaccggctgatcgattgattagttctcgctgagagctaatgtgggtagttgagtcaggatgtttgccttcgcgagcgaaagccaagacttgttagaagaaaaagtttttcgtcgtagaacttaccatcgtaaatattttggtgacgtggttaaggacttcactatcgatattggttatgatactaccgatcgcgatcctactgtattggccgattatttctcattgtatttctttttacttaacaacgatagtgttgggcctatagcagcctcaattgtggtaagcccaccggttagcgggactcataaaattcgagcgcatatcgataatcaaccgaactgtgaaggtaacgtgacttacgttaaaaccttcgacaaaagtcgctttgtgattcgcgttaaagcgtccccgtctatgagaggttactactcttttcgggtgtttcttagtagcgatgtcgctagcgaacgcagcgagttcgtgtgcagttttgttggtagcaggtttctttgctgttgtacacaaacgatatctgaaaatttgagtaaagtttgttcatcttccttcttcttcagagcagtttcagaaaccgcgaccaacgaattttctgttgcgactgatgatgtggaagacgttaagtacataagaaaacaagccgagggtttttcacgttgcgctgacccataccctcctaggtgttatcgtagcactaatttgggcgattcttcaggggttcagagtcgtacgattgaagaggaaggttatatgacgggcactgcaggtaacgtcgcagtcaccgtcccgaatactccactagttagtgctgtctctccgtatatcgcagggtacaacgagaatgcacgctcgcgcgtctcattaatacgccgggtctgttgttacgccgtttgcgttttagtggtgtccgttcttataatgagcggtttattagccattatatttatatgatttagtgtagtaactcataaggtacaattacttacttaagactcgccgtttgactctgtttaaacggggtttaatggactgcgtaattcaagggtttttaactttcctagttggtatagctgtgttttgtgcctttgccggactgattatcattgttataacaatttatcggtgcacgattaagcccgtcagaagtgcttccccttacggcactcacgcgactgtctaagcggtatggtgcttttgggtttagacttcggtaccacgttttcaacggtggctatggctacaccttcagagttagttatactcaaacaatccaattcatcgtacatacctacgtgtttactcctgcatgcggaacctaacagcgtatcttatggttacgatgcggaatatttagcggcttctggggagtctggttcgttttacaaagatttgaagcggtgggttggttgcactgcgaagaactaccaaacctacttacacaaactatcaccttcctataaggtgatagtgaaagagtttggaactaagagcgtgccggtgccatatttgtcacctctgaataacgatttaggactcagcgtcgctttaccttcactgattgcttcgtatgccaaatccattctgtcggatgcggaacgagtgttcaatgtaagctgcactggagttatatgttcggtacctgctggttataacacgttacaacgagcttttacacagcagagcatatcgatgtcgggttactcttgtgtgtacattattaacgaaccttcagcagccgcgtactccactttacctaagttgaattcggcagataagtatttagccgtttacgacttcggcggtgggacttttgatgtctctatagttagcgttagattacccactttcgccgttagaagttcgagcggtgacatgaatttaggcggtagagatatcgacaaaaagttatccgataaaatatacgaaatggctgattttgtgccgcaaaaagaattgaacgtttctagtttaaaggaagctttatctcttcaaaccgatccggtcaaatatactgtgaatcattacggaatgagtgagaccgtatcaattgatcaaacggtgttgagggagatagcctcggtgttcataaatcgaacgatagatatacttacgcaagttaaggttaagtctagtatgcccgaatcgcaaagtttgaagttagtggtagtcggtggaagctcgtacctaccagggttgttggacgctttggcaaccgtgccttttgtgtctgggatagtgccggtggaagacgcaagaaccgctgtcgccacagggtgcgctttgtatagcgagtgcttagatggtaggtctaaggccctactaatagattgtattacgcatcatttgtcggtcacgacgtttagcgcggattcggtcgttgttgcagcggccggtagtccaattccttttgaaggtgaacaaaaactcacgttacgcaaatgcgttagtacgtctaactatcaagcaagaatgttcgaaggggattacgaaaaagttttccgaaatgaacgtatatacgcagcttcgatatcattgtttacattaggagttaattggagtgtgcctaacgacgttgagatgactctcgtgaccaaagtggactcgatgggtaaagtggaattttaccttaaaggtccatctggtgaactggttaacgtgcaaggtacttcgcattacgattatgctggtatgcctcaccccactagaaagctggtgaggcttagcgattacaatgtaaactccgccgctttagttttagctttgacattaactcgcgaaaaacgagaaaagttccttttgcgaacattatttgacactttactagcggatttacgaaagacagcaagtttaggcgagtactcaaagaagtacccgatcactcgaaacgatatcgatgtcgtctcatcacgtatggggatcgttgtttcgaaagttttacggggaagcgatttggaaagaatacctctctgaatcaactcgaaatttcgatgaaagaaatgtatcgttagaccacactttgagttcgggtgtggtcgtccgtaggcagagtcttttgaatgcgcctcaaggtactttcgagaacgagttagcgctattgtacaattcggtggtgattaacgattttgttgagttgactggtatgcccttgaaatctttgatgacaggtatcgaagaccgtaaggtacctgacgaattaatatccgttgacccgcacgaagtcggatgtagattcacgttaaacgacgtggaatcgtatctaatgagcaggggtgaagatttcgctgatctagcggcggtcgagcattcgtggtgtttgagcaactcttgtggtagactattaagttcgactgagatagatgcttacaaaaccttggtgtttactaagaattttgatagtaatgtatccggagtgactactaagttagagacttatctatcgtactgcatatcattgtacaagaaacattgcatgaaagacgatgattattttaatcttatcttacctatgtttaattgtttaatgaaagtgctggcgtcgcttggtttgttttatgagaaacatgccgacaatccgctactgaccggaatgctcatagagttttgcctagaaaataaggtgtattactctacttttaaagtgaatttagacaacgtcagattgtttaagtctaaagtgttgcctgtggtgttaacggtttgggatatatccgagcctgatgacccaatggatgaaagggtgctgattcctttcgatcctacggatttcgtgctcgatttacctaaattgaatatacacgatacaatggtggtggtgggtaatcaaatcagacagttagaatacgtagtcgaaagcgatgctttagacgatctatctcaacacgttgatttacgtttagcagcggacaatcccgatctacgcgttggtctgcgttgggcagggatgtttgtgtactacggtgtttatcggtgtgttgttgatagagcggtggaacgaccgacgttgtttagattgccgcagaaactactgagtcaggatgatggcgaatcgtgctcattacacatgggttccgtcgaagctttattcaatctggtgcagaaagtgaacaaggacataaacgttagacgtcagttcatgggacgtcatagtgaagtggctttgcgactgtatcgcaacttaggtttgaggtttccaccgatctcatcggttaggttaccggctcatcacggttatttatacgtcgatttttacaaaagagtacctgacggtgctgttaccgccgacgaactcgaaagtttacgtcaattacgctcatccgtggacgttatgtgtaaggacagggtgtcaatcacacctccaccattcaatcgacttagaagaggttcttctagaacatttagaggtcgaggcgcacgcggtgcgagctcgcgtcatatgagcagagacgtggcgacttccgggtttaatttaccttatcatggcaggttatacagtacttcctaaaaccgatgataaagaaatggatcctgtgagtgctgccgtgcccggtaagtatccggatgtcattgaaaagttcgtggccaataggtccgtagatgcgttaatagaaggcgttataagtaaattggataccaattcaatatacgaagattccactgaaaagtttactggtgaacacttgaaatacgttatggttactatggacactttcttattagaaaactacaaaacgaaaacggaagatctgttggttcacttaactatgatccaaaagaggttatacactatatccacgagcactaaaaccaagtttcgcgataaaggttgtattagttacgtacaagggggtttacgatataagttgttggacaaagtagtttttcctttcattatatcgaaatttaccgacagggagactccaaacgctctacgtaagtttgcttgcactttcgaggagttacacttgtgtatggctaggttaagacccgacttatacgaaaataaaaggacgaccagggctgggactccacatttaaagggctacctatcagctgactttctctcaggttctctccctgggtactccgaacatgaacgaggtatcattcttcgagcgtccgagtctatgttagctagacgtcaaggttacgaggaggcgaccgagcttcttaacctacgcgatttgggtaagtacttatagttggtttggggacggtaacattatactatcccatgagcgctgccttaagggtcgttaattgacgacttttgatatatttactaggtttgaattatggacgacgaaacaaagaaattgaagaacaaaaacaaggaaacaaaagaaggcgacgatgttgttgctgccgagtcttctttcagttccgtaaacttacacatcgatccgactttgataacgatgaacgatgtgcgtcagttgagtacccaacagaacgctgctttgaacagagacttattccttactttgaaagggaagcatcctaacttacctgataaagataaggactttcgcatagctatgatgttgtatcgtttagcagttaagagttcatcattacaaagcgatgacgacgccacgggtataacgtacactcgggagggtgttgaagtggatttgtctgacaaactttggactgacgtcgtgtttaactctaagggtattggtaaccgtactaacgcccttcgagtttggggtagaactaacgatgccctttacttagctttttgcagacagaatcgcaatttgagttatggcggacgtccgctagacgcagggattccggccgggtatcattacttgtgtgcggatttcttgactggggctggtttgactgatttagaatgtgctgtgtacatacaagctaaagaacaattattgaagaagcgaggggctgatgatgtcgtagttactaatgtcaggcagcttgggaaattcaacacacgttgatctgttgcgttccgattcccggtttctatcgggatggtggagtttcatcgtgaacgtgggtgatataatcgtccggttcgcgttacacgttcctaatgaagatatgctgaatagtttttcagctatatcgaattgtacgattatagcggacggtagtgctttactaaaagataatactgtggtcgatcgtttagaaggcatgaatcctttggcttatttattaaaattagcgaaaacgactactactatttgttttactatgtctaataaggttctttttggtactactaaatccgaaccacttagttgtttagctatcacgtcggatcgagttttattcaaagttgttatgggtactaacgttgacgattctcgatgcggctgcagtatttggttttacaacaacggtacgtttcaaaatggattgatccgttgtaataatctcgtcactttgtttagcgtgacttagacacgaagtgactgttcggattcaattgctgcaatgagcattcggcgctcgtggttaaaggttatggctgtagttacggtattatggtacggtaaagagccttccattagtgaaggttacaatgctctcatgaatgatgactttaagtttatcgatacgcattttacaaacgtttcttacgctaagaaatgttacgatttggctaatttcgatttagactttctacgcatcgttatcattcctttgagtgggggtacggtgaatgaatcgcgtgctgatcgcactaacgtttcagaaattgtcgaatcgcatgtgagcgaccgagacaggatgagcatcttgttgcgtaataagcggatccaaattccttcgctcttaccttgcgataactagagtctactcagtagtacgtctattagtataacgtattaagcactttagtaaagggttttgtttaaatcaaacaatatgcgagcttactttagtgttaatgattacataagccttttggctaaggtcagcgctgttgtggaacgtttatgcgatcccagcgtaactcttgcggaagtgatggacgaaattaatgactttaactcgtttctcgctttagtgcactctatgaagtcagacatgaacggagaccatcaggatggccaccacgagatgggtgaacacaagtctcggttgttatgcaacatagaggcgaaattgcgagtacttctcgacatcataagacgtcggttcactcgcgacaagctgctctgtactagcgcgacagatgtcatgggcttctttgtaatgaggtacatgagttctagccacaccagcttcgaatccgtaatgaggacggagttgaggttggtggttaaggcggtactgtcggatttatcccgcgcgcataaactggattttagcgagcgagcttttgcggcttatggtatccttttgcaaaagggtactgtgtcgaccgtttgcggtcagtttgacattaatttagtctctccatcttgcgtgtaggttaatacgcttctcagaacgtgtggttgtattaactaactttaattcgaacaaatatattgtgaaagtctgcgagttacaatggataatactagcggacaaactttcgtttctgtgaacctttctgacgaaagcaacacagcgaccactgacgtcgaacccgtgagttcggaagcggatcgcttggattttttacagaaaatgaatcccattattatcgatgctttgatacggaagaatagttatcagggcgctcgctttcgcgcgagaataataggagtgtgcgtggattgcggtagaaaacacgataaggggttgaagactgaacgtaagtgtaaggtcaacaatacgcagtctcagaacgaggtggcgcatatgttaatgcacgaccccgttaagtatttaaacaaaagaaaagctagagccttttctaatgcggagatatttgcgattgatttggttatgtacaccaaggaaaggcaattggctattgatttggccgctgaaagggagaaaacgagactggctcgtagacacccgatgcgttctccggaagaaactccggaatattataaattcggtaggactgctaaagcaatgttaccggacatcaacgccgtagacgttggtgataacgaggaaacttcgtcggagtatccagtgagtctgagtgtttctggcggagttctccgcgaacaccacttcatctgattgaagtggacggaataagttcctcgcggaactttgtgttgggttggtaaagacccttatgatggtgatatatcactagacaataaccggatgggtaaagtctttaaaatgatcgaggggaaaattaaccgtatcctctcgttggtctaagctcccacagagtggtagtggtctcaagtgaggcttaacgtatgcgtgaaccaaagaagttctccttagagtgtgtgttgtttacccaacgcactgtccctatggggggccaacataggtcca

SEQ ID NO: 1440 - DNA, 10749 bp, Citrus tristeza virus
  source 1..10749: mol_type = other DNA
atgtcgaaactcagaggaagcttctggtcttcggccatcgctgttaacagcgattacacgatatcgcgcatctggcgcaaacttaacaccatagtagtcctgcactactttggttttgttagaatcaccaaggtgattcgtgacaaatcggctgatatgccgatagtccctttacggaaatctgtatttccgttttctgttcgcgcggctgtcacgagcttcgtgctgctgggcgtcctcttgacgctccgcattcagggtgcctctgtggccttcccgttatcaacgcatctggcgttgttcgtccccgctctgttcgcgggtttttcgaggttttctctgtgcaaacctccgctcacctctgccgctaagaggtccctccgtcaggcaaagcgggaatctgtttccctttctagccgggcctcttctcgcttctctagggaagtccctcgcggcacacgttcaagacttcacagacgtgtggtgagacgagctgacactgccccagttgagagtccccaagacaagcctacccgacgaaacagccgacttggtaagacttctcacctcccttacgtgggggaggcagcgttggatgatatccttcgctggatcgaagaggttaatcctcatccctcgatggtcgctattccagtgcccatcacttttggaaccatgcctgcaacggcttggtgttcccactctgaagccgcagttttgcgtgccgccttgactatcacgcggctgaaactgatttctccactcaggagaaacacgtacggtacgtctataatgacgtatcttctgccactaaccgtccccgtacggtttctccccgcaagtgcgtccatttttcccagtaaatctaaactgggcgttgaggtcccctctggtagggaccttcacactgcgttcgtgagatcttctcacgcgagcgctttcttctctgacgcggttcgcgcttcgtttgttccgtccagcgcggaacaattttttcacttccgtcgtcagcggacgcatgttcttgctattacagacccggtcctgtgtggtacggtgtctgttttaatgtcggacggtgttaacacagcacgtctcgacgttgttgctccggcgtactatgcgtacgctgaatctttgggcgccagagtgcgctttttgtgggagtcgtccgacgtggacgacgctaaagttcgtgacggtcaatgttatgtccgtcatgtgttcgacgtggctctctactttgggagacgcgccgacctttccgtgcgtagagcgctgggtatgtaccccacagtgggtgcactaaaggcttatcttgttcgcgaatacggtcgcgactctcttaaggttcctatgcgtgggacctacacttttggcagtgtgtttcactgcttgtcgctaaatcttcaagtcgacctgcgatctattcctaaccatcatttagttggtgggacgtctgcccacgtcttaattgggcaggttcgagtcagtgttcctggctcgattgttaaaccttcacgttcggccgttcgtaggcgtaatagacgcatgcgacgtgatggttttctcggtagttccggttcttcttcttctgcgggggagtcgactcgctgttcggactgctcttctcctcgcggtttaccttctccttccgttttaaaaccttccctaggtcggatcccgagtatagatcggcggttccggtttcctgcgggtacgcagttgcgcgtctccgtacctaggcgggtcgatgaccatgtttacgtgtcgactggtagcaacttcgatgagttgtgccatgcagttttgacacgtatgtcaaaaggtacaactctagaaatccttttacactcgattcgagagcggaagggactacttggttttgcggcgtgcttccgttgggggtcttcacacgtgtttgtaaagcgtggcaactttactgcccgatttcctatttcggcggtcaggtatgagaatcagtatgccgcggttatgatggatgtggggactagttgggttccgaagggctacgttcccgatgttgatgttgtgaaacgtcggagaagtcgtaatcgtcgttttcctctttcccatcgtgcggtggatcagtcggtccccgcgttacagtcgagtcctgtcgaggttgcttcggtttcgagtgataagccttcatcgtcgcagaaggcttcttcaccttctacttcttcttcttcttcttttaactcgacaaggagttcagactgggtgaatgtcggtttctctcatcgaactactaataaggttcgtgaaccgcgttatgctggtcatcgtaggatcggaaattttactttcccgaggggcacagtgtacaacacgcctgtcgatgagcgcgcctataaacgtgttcttagattgcgagataccacagcctgttcctttctccgtatactgctagctcgtttgtcgggttacagacctttaagtgacgagttctttaacaagtgtgtcacttcccggtttgtcgcgtgcattgaacctgtggaatcaggtctcgttaaggtgcatttccgttctgatgttttccgtgcctctttcccgtttgacggtcaacctatacaccccgccacggctttgacattggaagtggtggtctcttgggattggatggttacggcttttcagaatcccttgaaggatggatattgctacattcgccatttcgccgaagttagtttgagcatggggcgaattttcttcaggagggacgtcgacttgggacctttcccatacgttttcgaagtgcaacaccgtcttgaaaggttgtacgggaaagctgcgttaagatacggtgttaggggtcaatattcagccccgcgctgttttcactgttgctacaacgattcaccgagaccgatggcgtcctttaatgggtaccataagatgggtggtgaagataactccctgataatcacagacaccgacaggttgcgtgctgtggggagtgcctatgaaaaagtgaagagaaacataccagattcgttattggttcggtctgtagaaaaggaccttatagagtttaatcagactctagtcgacatgcatcgatccagaccgggcgttgtcgtacctttccaaatgagtgagaatcagcaagtgatgcttactagggcgtacccggaatttaatattaattttattcattccgtacattccgatcatccggtggcagcaggttctagggcgttggagaatcatctcgttcgtaaacacgctggtaccgattattcggatgtggggggttgtccgctgtttcatttacgtgcgggtcactccggcgttcacgtttgtagaccggtgtacgatgttaaagacgctcatcgtagagtagtccgtcatcaccaacttagtaaggtttcgctagatcagagtgacggtgttaaacaagttggctggaccgtaaacacgaattctgtatgcggtaacattttgggagagtgttatcatgcatcggaggcgatggttatggttcaagtttatgacgtaccgctacgtgagttgtgtagggctatgataaacaagaaaacttccgtgtgttatatgaccatggttacacctggtgagttgttggacgcccgcgagtccttttttattaaggacttggattgttcggttgagttagatcccattgcagacagggttgtttactgtttcaacaattctgcgtatacacacacgtactccactatatgtgagtgtatgcgaactccttgcttggtagtggacgggtttttgtttactatcgaaatggtatcgctcaggtgtagcgttaattactattgtatcaccaagtcgtcggtctgtccgagaattagtgagactaagcggttgcgctaccgtcggtgtgatagcgacttgattagaatcaaaattccccggtactccagtaagactcgtagttgtttacctgggtgttactatttgtacttggacgccaagtttgtaagtcgcgtgtacgagtacgtggtcaataactgcgttgtggtgaacgcgaaaacttttgagtggacttggaattacatcaaatcttgcaagtcgagagtggtgatcagcgggaagattatacaccgagacgaaccaatcgctttagagtacttagatgggttttctgcggttatgctgtccgctggcgtgaagggtaggcaaaacgcggacgtttctagacgcttagccgctttttcgggtgaaacttcgattttcgagttagtggggtttgctatatccgagaagtgccgcgacttgttcttgggtattcaggacgctgtggaaagatgcgtgaagtcgtacctcaggaattcgtttaatatgagtttcgtggacttgtccgaccccttacttacgattagcgaatattcagaattggacgttcctatcgacttaccgggtttcggtggaatagtggacggtaacgaaactagacttatggaagacggtgttaaatcggctttattacgtaaagcggttcaagccgaggctcagttgagtcttaagagaggcaatacttccgaaatcgttccgtgtgatgacgatgacgactcgaacggtgatgattcgcgtgtttcgctcgatacggactggtggttcgtccttcggggtggtagttctggcgggttgcgagctggagccgccccttctttgtttaggtgtttactcaggaaattgggtgggggtttatgtttggcaaagaaagtgttggaactgttagtcaagcgggtggttgaatcgttttctcgtttgaagcggaaaaccgctcgtttaacgtccttcgctaatttgttgcttgcgaggctctcttgcgggtttttcgatgacactgttttttctgcggtctgggaaatagcgatcaacctgaccaggatcgtcgatggagtagtcaagacaaaactggggtgctttcgtaatttatttcgattgattcccaagttatacgctggttgtaaggacgttgtgaaggacgttagtaacgcttacaggtcggttgtctcgttttccgctgaggttttgggtaagagttactctaaactttgtcagttttgcttggaaatatttgacatcgggcttattgaggtttctgctcgtaatttgggactggaaacatgcgtttcaatagcactagctatttttgatgtgttgattacttttcctttggggagcgttagttttcccgtcgtttgcgctagggttttcggtcgtctcgctatggaagtgggatcgaactttttgtttaagaaagttttcggtaaacccgaaactcttggtgaagatactttccgtaggactgtgagtatggttttgaggcccaaagcgtttgacaagctttccgtggatgcgaaaggtttagttaggtgctctggtgttattcctggagtgttaaggataatactatcttccttgttttccgaagatgacgcttgggtgggttatagtaaacatgaagtttcttcccttcctattgttaccttttgtgtgaagagattgtcttattctctggagcggtgtaaggaagcgtgtgtcgcatttattgttgactctgctaagaagattttgaaatctttaacttcagagttcaacgaatccattcaaaactccgacttgaccagtggtgctaagtccttgtacgggcacgtgagctcgatactttacacctctagtggtgtgattaataaagcaggaagcgccgtcgctactgttaaagcggtcgggagtgatatcagtggtcgtgtgaaacgtatgcgaccccgattttctctgtcccgtcactttgacgagcagactagtgagtactactctgctagcgattgttccgaactagatgagtcgttgtttagtgaaacgcctggtcttcgtggaaacgccaggtgtagagatttgtttcgtatcgtgtctagacgcgcggtagcgtgttgtgagtacgtgacaattcttttgaaacggctagcgtcgcgtgccggtgaatactcctactcgtatgtgatggatacgctcgtgagattgtatgtggcgaccgatgatgttgttagacggtgcaggtcctttacgttcgactgtactgataaagcatctaatttcgtcaccgggtttcttagttggcgcagcttacgttctggtgcgtactctgcaactccagggttgggtggtggtagtagaggtttaacgtcgttttctcacaccggtggattcacgcgcgttatcggcgctcttgggaacaccttatcggtggtgtttgatgaggaattcttcagaactttgctgcatcggttgagggcagatgttgtggttttactggtggagttcttgaaaaaccttcccgtttgtttgttttcaatatacacttttattgaatgtcggggtaggatctttcctttaagagagttcctatggggtttttgtcgtttcgtttgggatgttatcgaggggttgtccatcaatacttatcaatacctctctgctgtcgctgagaaagtgtatcgaggtgcctttaatcgtcgatttaacgaagaggatgagaggacgcttcgagtgatcacggaagcagagggaagaatcgaatttttgcgagttgttctcgcggaaatggaaaggttccgtgctgcgtcgaacgaggtttcttcgtcgaggtcgtctgatagtccttcattcccacctacttacggtgaaattgaggagttaaatgatgattcctccgatagtgcgctagtgataggcgtcgacaacggtaccggccgcactatcgttgacggtgagaccgattctgcgtccggtagcgatagtgacgtttctatcccgttggatcgcgattttgaacaaatcgggcgtcttggcggaaacggtaacgtcgatgtcgttcggctgggtttgaaattcgttctgaagttgttacgcaacctattcgatgctagaagttttaaagtgttgtatgggttgttacttcaaacccttttttatggtggttcggtaaataaatttgtgtgtcgtctggtctttagtcttgggacttgcttacctttcgagttactccgatttgcgtgttcagcgaggcggttgttgaagagtttggcatcatttgtttaccagactaaccttttcagcgaagttatggtggagcatttgtttagcgtttcccgactgctttatgattcccggtacttcgcgactgtgttttcggaattggagagacttaacttctatttagactatttcctttcgctcccgaagagatatctattccctaattctagggctcgtagttgtgctagggttccggttcccgtgattaggaccgaaggagtggcaccagtccgtgagagatcactaaatgacatactggactctttagactctttaaaggtgtcggacctcaaagggaagtcgacgttcgttgatgatggggagtcggattccggtagtgaacattcgggtagttcgatttcgttcggttccgtcaacgaagaagttttaaatgcggtaaatggtgacagcgtttgcgaaaaagccccgttgatgaagcatgttaccgcacttagcaggttggaacgccaccctagtggtcgtaaagacattcctgtttctaggaaaacttttgtgcgtggtgaatcttcgggtgtgaaatcgaaggtgagtatgtgcgattacttggtgaccttgaattcttcgtttggcacagtgcctgacatgtaccctgttgcgcgtgacataacgtataagaaactgactaacgccatgcgcgaattctattactcgcaaaaaataaccttgtacgaacttcacgggaagttgagttcctattgggacgagttgaaggtcgcaggtttcgatagaaagttaacgagaatggatttggacgatgatgtctatgttgttgactttaatcggaaattgttggtggggagaaacggatctcatccgtttcgtaatacgttaaagtcctattgttttatgttttgtaacgatgggttggttccttgcccgcgttctcagaaatatgattatgctttgatttctaatcaaacgtcttttgttgccgcgaattcgttcttacgtgccgtggatggtaaggatttgacttttaccaatgaggaacatagccttatcgtttatgaagctcctcccggtggtggtaagactcattctttggtgaattcgtacgcggattattgcgttaaagtatcttgtttagtagtgaccgctaacaagaattctcaaaccgagatatctcagcgcatatctaatgaattgatgggcaggaagctagctgctaagtatgttaccgatgcagcttccagagtgttcactgtagattcttacttaatgaatcacttgcgacttacgactcaactgctgtttatcgacgagtgcttcatggttcatgctggggcaattggagccgtggttgagttcacgtcttgtaaagcggtggttttctttggtgatagtaagcaaatccattacattcaccgaaacgatctcggggtttcctttgttgcagatattgatgcgtttattcaaccggaacatcgtatttacggcgaagtgtcctataggtgtccttgggacatttgcgagtggctttccgagttttacccgcgacacgtagctactgctaatgtagggagtattgggaagtcgagtgtgtcaatagaggaaatcaatgggtgcgatgacgtaccttacgacaaggcggcgaagtacattgtgtacactcaggctgaaaagaacgatttgcaaaaacacctcggtcgcttaaccgtgggtcggaacaaggtagtaccaattgtaaataccgttcatgaggtacaaggagagacctataaaagggtacgtctggtgaggtttaagtatcaggaggataccccgttctcttcaaagaatcatattgtggttgctttgactagacatgttgattctttggtttattccgtacttactagtaggaggtacgacgatactgcgactaacatagatagggcgaaggaaatttttgacaaatttcgttcgtcgaatcactcgtacggttcgtcatcgttagagtggtaccttgaaaagtatcctaccgaatataagggtagtaaagcatcctctgctccgataagttgcattaacgaatttcttaatgaggtcgtcgttggttcttctgtcgtgcagttgggtgatgtgtctgaagaactaagttcacgtccctttgaatcgggttgtgataatgttactgtagagacaccgcccctcctgactcgggtaacttacacgaaccggctcgcgttcggcgtagtaaggtcacaagcaattcctccaagaaaagcgtcactgcaagaaaaccttctgtcgtacgaaagtcgtaattataactttatcaagacggaacggtttgttggaccaagcgaatttggtagggcgatggctgctgctgttatcgaacgttgtttcaaaatggaagagatggctaagataaggtgtgatattatatcccttactgaagctaacattttaaaatggctcgataagcgcactccctgtcaaataaaggccgtacacggggagttgaaacttcccttttcggtggaggagcaaatttccaacttcaaactgatggttaaacgtgatgctaaggtaaaacttgacgattcaagtctatctaaacatcccgctgctcagaacatcatgtttcataagaagtttatcaatgccatattttccccgtgtttcgacgagttcaaaaatagagtgttgtcctcgcttaatgacaatatcgtgttctttactgagatgacgaacgctgggttagcggaaattatcagaagaatcattggtgacgacgacaacttatttgttggggaagtggatttcagtaagttcgataagtctcaggatttgttcattaaagagtacgaacgtacgttgtattccgagtttgggttcgataccgaacttctcgatgtgtggatggaaggtgagtatcgcgctagagccaccacgctggacggtcagctgagtttttcagttgatggtcagcgtcgttctggaggttcaaacacttggattgggaattccttggttactctaggtatcctttcgttatattacgacgtttcgaagtttgacttactcctcgtttctggagacgattctttaatttattcgagtgaaaagataagcaacttttcttccgaaatttgcttagaaacaggttttgagactaagtttatgtctccgagcgtgccatatttttgctcaaagtttgtggttcagaccggtaacaaaacgtgttttgtgcctgacccttataaattattagtaaagttgggggctccacaaaataagttaaccgatgtcgagttatttgagttgttcacttcttttaaggacatgacgcaggactttggtgatcaagtggttttggagaagctgaagttgctagtcgaagctaagtacggtttcgctagtgggaccactatgccagcattgtgcgctattcattgtgtgcgatcgaactttctgtcctttgagaggttatttcctttcattaggggttggtatgttgttgacgctctaaaactcagacagcttaggaaactcactaatttgatctgtgaacgtgtagtttacgacaatcgggtgagttatttttcgtacttcgataacccgttcactaaacctgacgctaacgacgataacgtggacgacctcggacaagcgggtgaattagcaaccggctga

SEQ ID NO: 1441 - protein, 3582 aa, Citrus tristeza virus
MSKLRGSFWSSAIAVNSDYTISRIWRKLNTIVVLHYFGFVRITKVIRDKSADMPIVPLRKSVFPFSVRAAVTSFVLLGVLLTLRIQGASVAFPLSTHLALFVPALFAGFSRFSLCKPPLTSAAKRSLRQAKRESVSLSSRASSRFSREVPRGTRSRLHRRVVRRADTAPVESPQDKPTRRNSRLGKTSHLPYVGEAALDDILRWIEEVNPHPSMVAIPVPITFGTMPATAWCSHSEAAVLRAALTITRLKLISPLRRNTYGTSIMTYLLPLTVPVRFLPASASIFPSKSKLGVEVPSGRDLHTAFVRSSHASAFFSDAVRASFVPSSAEQFFHFRRQRTHVLAITDPVLCGTVSVLMSDGVNTARLDVVAPAYYAYAESLGARVRFLWESSDVDDAKVRDGQCYVRHVFDVALYFGRRADLSVRRALGMYPTVGALKAYLVREYGRDSLKVPMRGTYTFGSVFHCLSLNLQVDLRSIPNHHLVGGTSAHVLIGQVRVSVPGSIVKPSRSAVRRRNRRMRRDGFLGSSGSSSSAGESTRCSDCSSPRGLPSPSVLKPSLGRIPSIDRRFRFPAGTQLRVSVPRRVDDHVYVSTGSNFDELCHAVLTRMSKGTTLEILLHSIRERKGLLGFAACFRWGSSHVFVKRGNFTARFPISAVRYENQYAAVMMDVGTSWVPKGYVPDVDVVKRRRSRNRRFPLSHRAVDQSVPALQSSPVEVASVSSDKPSSSQKASSPSTSSSSSFNSTRSSDWVNVGFSHRTTNKVREPRYAGHRRIGNFTFPRGTVYNTPVDERAYKRVLRLRDTTACSFLRILLARLSGYRPLSDEFFNKCVTSRFVACIEPVESGLVKVHFRSDVFRASFPFDGQPIHPATALTLEVVVSWDWMVTAFQNPLKDGYCYIRHFAEVSLSMGRIFFRRDVDLGPFPYVFEVQHRLERLYGKAALRYGVRGQYSAPRCFHCCYNDSPRPMASFNGYHKMGGEDNSLIITDTDRLRAVGSAYEKVKRNIPDSLLVRSVEKDLIEFNQTLVDMHRSRPGVVVPFQMSENQQVMLTRAYPEFNINFIHSVHSDHPVAAGSRALENHLVRKHAGTDYSDVGGCPLFHLRAGHSGVHVCRPVYDVKDAHRRVVRHHQLSKVSLDQSDGVKQVGWTVNTNSVCGNILGECYHASEAMVMVQVYDVPLRELCRAMINKKTSVCYMTMVTPGELLDARESFFIKDLDCSVELDPIADRVVYCFNNSAYTHTYSTICECMRTPCLVVDGFLFTIEMVSLRCSVNYYCITKSSVCPRISETKRLRYRRCDSDLIRIKIPRYSSKTRSCLPGCYYLYLDAKFVSRVYEYVVNNCVVVNAKTFEWTWNYIKSCKSRVVISGKIIHRDEPIALEYLDGFSAVMLSAGVKGRQNADVSRRLAAFSGETSIFELVGFAISEKCRDLFLGIQDAVERCVKSYLRNSFNMSFVDLSDPLLTISEYSELDVPIDLPGFGGIVDGNETRLMEDGVKSALLRKAVQAEAQLSLKRGNTSEIVPCDDDDDSNGDDSRVSLDTDWWFVLRGGSSGGLRAGAAPSLFRCLLRKLGGGLCLAKKVLELLVKRVVESFSRLKRKTARLTSFANLLLARLSCGFFDDTVFSAVWEIAINLTRIVDGVVKTKLGCFRNLFRLIPKLYAGCKDVVKDVSNAYRSVVSFSAEVLGKSYSKLCQFCLEIFDIGLIEVSARNLGLETCVSIALAIFDVLITFPLGSVSFPVVCARVFGRLAMEVGSNFLFKKVFGKPETLGEDTFRRTVSMVLRPKAFDKLSVDAKGLVRCSGVIPGVLRIILSSLFSEDDAWVGYSKHEVSSLPIVTFCVKRLSYSLERCKEACVAFIVDSAKKILKSLTSEFNESIQNSDLTSGAKSLYGHVSSILYTSSGVINKAGSAVATVKAVGSDISGRVKRMRPRFSLSRHFDEQTSEYYSASDCSELDESLFSETPGLRGNARCRDLFRIVSRRAVACCEYVTILLKRLASRAGEYSYSYVMDTLVRLYVATDDVVRRCRSFTFDCTDKASNFVTGFLSWRSLRSGAYSATPGLGGGSRGLTSFSHTGGFTRVIGALGNTLSVVFDEEFFRTLLHRLRADVVVLLVEFLKNLPVCLFSIYTFIECRGRIFPLREFLWGFCRFVWDVIEGLSINTYQYLSAVAEKVYRGAFNRRFNEEDERTLRVITEAEGRIEFLRVVLAEMERFRAASNEVSSSRSSDSPSFPPTYGEIEELNDDSSDSALVIGVDNGTGRTIVDGETDSASGSDSDVSIPLDRDFEQIGRLGGNGNVDVVRLGLKFVLKLLRNLFDARSFKVLYGLLLQTLFYGGSVNKFVCRLVFSLGTCLPFELLRFACSARRLLKSLASFVYQTNLFSEVMVEHLFSVSRLLYDSRYFATVFSELERLNFYLDYFLSLPKRYLFPNSRARSCARVPVPVIRTEGVAPVRERSLNDILDSLDSLKVSDLKGKSTFVDDGESDSGSEHSGSSISFGSVNEEVLNAVNGDSVCEKAPLMKHVTALSRLERHPSGRKDIPVSRKTFVRGESSGVKSKVSMCDYLVTLNSSFGTVPDMYPVARDITYKKLTNAMREFYYSQKITLYELHGKLSSYWDELKVAGFDRKLTRMDLDDDVYVVDFNRKLLVGRNGSHPFRNTLKSYCFMFCNDGLVPCPRSQKYDYALISNQTSFVAANSFLRAVDGKDLTFTNEEHSLIVYEAPPGGGKTHSLVNSYADYCVKVSCLVVTANKNSQTEISQRISNELMGRKLAAKYVTDAASRVFTVDSYLMNHLRLTTQLLFIDECFMVHAGAIGAVVEFTSCKAVVFFGDSKQIHYIHRNDLGVSFVADIDAFIQPEHRIYGEVSYRCPWDICEWLSEFYPRHVATANVGSIGKSSVSIEEINGCDDVPYDKAAKYIVYTQAEKNDLQKHLGRLTVGRNKVVPIVNTVHEVQGETYKRVRLVRFKYQEDTPFSSKNHIVVALTRHVDSLVYSVLTSRRYDDTATNIDRAKEIFDKFRSSNHSYGSSSLEWYLEKYPTEYKGSKASSAPISCINEFLNEVVVGSSVVQLGDVSEELSSRPFESGCDNVTVETPPLLTRVTYTNRLAFGVVRSQAIPPRKASLQENLLSYESRNYNFIKTERFVGPSEFGRAMAAAVIERCFKMEEMAKIRCDIISLTEANILKWLDKRTPCQIKAVHGELKLPFSVEEQISNFKLMVKRDAKVKLDDSSLSKHPAAQNIMFHKKFINAIFSPCFDEFKNRVLSSLNDNIVFFTEMTNAGLAEIIRRIIGDDDNLFVGEVDFSKFDKSQDLFIKEYERTLYSEFGFDTELLDVWMEGEYRARATTLDGQLSFSVDGQRRSGGSNTWIGNSLVTLGILSLYYDVSKFDLLLVSGDDSLIYSSEKISNFSSEICLETGFETKFMSPSVPYFCSKFVVQTGNKTCFVPDPYKLLVKLGAPQNKLTDVELFELFTSFKDMTQDFGDQVVLEKLKLLVEAKYGFASGTTMPALCAIHCVRSNFLSFERLFPFIRGWYVVDALKLRQLRKLTNLICERVVYDNRVSYFSYFDNPFTKPDANDDNVDDLGQAGELATG

SEQ ID NO: 1442 - DNA, 1083 bp, Arabidopsis thaliana
  source 1..1083: mol_type = other DNA
atggctactgggcaggttctgtttcagcgattctattgcaagaagtctttggctaaatttgatgtcaagatagttgctgccagctgtgtatggcttgcatcaaaactggaagaaaaccctaaaaaagctagacaggtcatcatcgtattccacaggatggagtgtcgcagggagaacttgccattagaacatctggatatgtatgccaagaagttctctgagttgaaagttgaattaagcagaactgagagacatatactgaaagagatgggttttgtttgtcatgttgaacatcctcacaagttcatatcaaactaccttgccacattagaaacacctccagaattgaggcaagaagcttggaatttggccaatgatagtctgcgtacaaccctctgtgtaaggttcagaagtgaggttgtggcttgtggggtagtgtatgctgctgctcgtaggtttcaagtaccactccctgagaatccgccgtggtggaaagcatttgatgcagataaatctagtattgacgaagtgtgtagagttcttgctcatttatacagtcttccaaaggctcagtatatctctgtttgcaaggatgggaagccatttacattttctagcaggtccgggaattctcaaggtcaatcagcgacaaaggatctgttgccgggagcaggcgaggctgttgatactaaatgtactgcaggatcagctaataacgacttgaaggatggaatggttactacaccacacgaaaaggctacagattccaagaaaagtggtaccgagtcaaactctcagccaattgtaggagactcaagctatgaaagaagtaaagtaggagatagagaaagagagagtgatagagagaaggaacgaggtagagagagggacaggggtaggtctcacagaggcagagattctgacagagacagtgatagggagagagacaaactcaaagatcgaagtcatcatcggtcaagagacagattgaaggattcaggtggacattcagataaatcaaggcatcattcttctcgggaccgtgactaccgcgactcatcgaaagaccgtcgtaggcaccat

SEQ ID NO: 1443 - DNA, 2586 bp, Solanum lycopersicum
  source 1..2586: mol_type = other DNA
atggctgaaattcttcttacatcagtaatcaataaatctgtagaaatagctggaaatttactgattcaagaaggaaagcgtttatattggttgaaagaggatatcgattggctccagagagaaatgagacacattcgatcttatgttgacaacgcaaaggccaaggaagctggaggtgattcaagggtcaaaaacttattgaaagatattcaagaattggcaggtgatgtggaggatctcttagatgacttccttccaaaaattcaacaatccaataagttcaattattgccttaagaggagttcttttgcagatgagtttgctatggagattgagaagataaagagaagggttgttgacattgaccgaataaggaaaacttacaacatcatagatacagataacaataatgatgattgtgttctgctggatcggagaagattattcctacatgctgatgaaacagagatcatcggtttggatgatgacttcaatatgctacaagccaaattacttaatcaagatttgcattatggagttgtttccatagttggcatgcccggtctggggaaaacaactcttgccaagaaactttataggctcattcgtgatcaatttgagtgttctggactggtctacgtttcacaacagccaagagcgagtgaaatcttacttgacattgccaaacaaattggactgacggaacagaaaatgaaggaaaatttggaggacaacctgcgatcactcttgaaaataaaaaggtatgttatcctcctagatgacatttgggatgtggaaatttgggatgatctgaaacttgtccttcctgaatgtgattcaaaagtcggcagtagaatgataatcacgtctcgaaatagtaatgtaggcagatacataggaggggaatcctccctccatgcattgcaacccctagaatccgagaaaagctttgaactctttaccaagaaaatctttaattttgatgataataatagttgggccaatgcttcacctgacttggtgaatattggtagaaatatagttgggagatgtggaggtataccgctagccatagtggtgactgcaggcatgttaagggcaagagaaagaacagaacatgcgtggaacagagtacttgagagtatgggccataaagttcaagatggatgtgctaaggtattggctctcagttacaatgatttacctattgcctcaaggccatgtttcttgtactttggcctttaccccgaggaccatgaaattcgtgcttttgatttgataaatatgtggattgctgagaagtttatagtagtaaatagtggtaataggcgagaggctgaggatttggcggaggacgtcctaaatgatttggtttctagaaacttgattcaacttgccaaaaggacatataatggaagaatttcaagttgtcgcatacatgacttgttacatagtttgtgtgtggacttggctaaggaaagtaacttctttcacaccgcgcatgatgcatttggtgatcccggcaatgttgctaggctccgaaggattacattctactctgacaatgtcatgattgagttcttccgttcaaatcctaagcttgagaagcttcgtgtacttttctgtttcgcaaaagacccttccatattttctcatatggcttattttgacttcaaattgttgcacacattggttgtagtcatgtctcaaagttttcaagcatatgtcactatcccaagcaaatttgggaacatgacttgcttacgctatctgagattggaggggaatatttgtggaaaactgccaaatagtattgtcaagctcacacgtctagagaccatagacattgatcgacgtagcctcattcaacctccttctggtgtttgggagtctaaacatttgagacatctttgttatagagattatggacaagcatgtaacagttgcttttctataagctcattttacccaaatatttactcattgcatcctaacaatctacaaaccttgatgtggatacctgataaattttttgaaccgaggttgttgcaccgattgatcaatttaagaaaactgggtatactgggagtgtccaattctaccgttaagatgttatcaatatttagccctgtgcttaaggcgctggaggttctgaagctcagtttttccagtgacccgagtgaacaaataaagttgtcatcgtatccacatattgctaagttgcatttgaatgttaacagaacaatggccttgaactctcaatcatttcctccaaatctcatcaagcttactctagcctactttagtgtagaccgttatatactggcagtacttaagacatttcccaaattaagaaaacttaaaatgttcatctgcaagtataatgaagaaaagatggatctctcgggcgaggcaaatggttatagctttccgcaacttgaagttttgcatattcatagcccgaatgggttgtctgaagtaacgtgcacggatgatgtcagtatgcccaaattgaaaaagctgttacttacaggattccattgccgaatcagtttatcggaacggcttaaaaagctgagtaaatga

SEQ ID NO: 1444 - DNA, 3156 bp, Solanum tuberosum
  source 1..3156: mol_type = other DNA
atggcttatgctgctgttacttcccttatgagaaccatacatcaatcaatggaacttactggatgtgatttgcaaccgttttatgaaaagctcaaatctttgagagctattctggagaaatcctgcaatataatgggcgatcatgaggggttaacaatcttggaagttgaaatcgtagaggtagcatacacaacagaagatatggttgactcggaatcaagaaatgtttttttagcacagaatttggaggaaagaagcagggctatgtgggagatttttttcgtcctggaacaagcactagaatgcattgattccaccgtgaaacagtggatggcaacatcggacagcatgaaagatctaaaaccacaaactagctcgcttgtcagtttacctgaacatgatgttgagcagcccgagaatataatggttggccgtgaaaatgaatttgagatgatgctggatcaacttgctagaggaggaagggaactagaagttgtctcaatcgtagggatgggaggcatcgggaaaacaactttggctacaaaactctatagtgatccgtgcattatgtctcgatttgatattcgtgcaaaagcaactgtttcacaagagtattgtgtgagaaatgtactcctaggccttctttctttgacaagtgatgaacctgatgatcagctagcggaccgactgcaaaagcatctgaaaggcaggagatacttggtagtcattgatgacatatggactacagaagcttgggatgatataaaactatgtttcccagactgttataatggaagcagaatactcctgactactcggaatgtggaagtggctgaatatgctagttcaggtaagcctcctcatcacatgcgcctcatgaattttgacgaaagttggaatttactacacaaaaagatctttgaaaaagaaggttcttattctcctgaatttgaaaatattgggaaacaaattgcattaaaatgtggaggattacctctagcaattactgtgattgctggacttctctccaaaatgggtcaaagattagatgagtggcaaagaattggggaaaatgtaagttcggtcgttagcacagatcctgaagcacaatgcatgagagtgttggctttgagttaccatcacttgccttctcacctaaaaccgtgttttctgtattttgcaattttcacagaggatgaacagatttctgtaaatgaacttgttgagttatggcctgtagagggatttttgaatgaagaagagggaaaaagcatagaagaggtggcaacaacatgtataaacgaacttatagatagaagcttaattttcatccacaattttagttttcgtggaacaatagaaagttgtggaatgcatgatgtgacccgtgaactctgtttgagggaagctcgaaacatgaattttgtgaatgttatcagaggaaagagtgatcaaaattcatgtgcacaatccatgcagcgttcctttaagagtcgaagtcggatcagaatccataaggtggaagaattggcttggtgtcgtaacagtgaggctcattctattatcatgttgggtggattcgaatgcgtcacactggaattgtctttcaagctagtaagagtactagatcttggtttgaatacatggccaatttttcccagtggagtactttctctaattcatttgagatacctatctttgcgttttaatccttgcttacagcagtatcaaggatcgaaagaagctgttccctcatcaataatagacattcctctatcgatatcaagcctatgctatctgcaaacttttaaacttaaccttccatttcccagttattatcctttcatattaccatcggaaattttgacgatgccacaattgaggacgctgtgtatgggctggaattacttgcggagtcatgagcctacagagaacagattggttttgaaaaatttgcaatgcctcaatcaattgaaccctcggtattgtacagggtctttttttagactatttcccaatttaaagaagttgcaagtatttggcgtcccagaagactttcgcaatagccaggacctgtatgattttcgctacttatatcagctcgaagaattgacatttcgtttatattatccatatgctgcttgctttctaaaaaacactgcaccttcaggttctacgcaagatcctctgaggtttcagacggaaatattgcacaaagagattgatttcgggggaactgcacctccaactttactcttacctcctccggatgcttttccacaaaaccttaagagtttaacttttaggggagaattctctgtggcatggaaggatttgagcattgttggtaaattacccaaactcgaggtccttatactatcatggaatgccttcataggcaaggagtgggaagtagttgaggaagggtttcctcacttgaagttcttgtttctggatgatgtatacattcgatactggagagctagtagtgatcactttccgtaccttgaacgagttattcttagagattgccgtaatttggattcaatccctcgagattttgcagatataaccacactagctcttattgatatagattactgtcaacaatctgttgtgaattccgccaagcaaattcaacaggacattcaagacaactatggaagctctatcgaggtccatactcgtcatcttttgtaagacatcttcttccttgctttacaacaataattaactcatcatcatagtaaactcgataataatctggataatagccttagtaagtcaaattgcaccaattcaacaaaagttcttgatgctgtcattgtgtttgatttgaatccttccaatattgtgtaacttgttatacttgcatgttcattcttgattttgggaagtgtaacatttcatttttcatcttttgtggctagcattcccaagagtgtgacaacagttgaagatgatgatgatagtgtgacaacagatgaagatgatgatgatgatgactttgagaaagaagttgcttcttgccgcaataatgtgtaagttcttatacctgcatgctcattcttgctataatgttctcttgttccttaattatgggacatctgacatattattttccatgttttgcgtcttttatttttctgcagcgag

SEQ ID NO: 1445 - DNA, 480 bp, Tobacco mosaic virus
  source 1..480: mol_type = other DNA
atgtcttacagtatcactactccatctcagttcgtgttcttgtcatcagcgtgggccgacccaatagagttaattaatttatgtactaatgccttaggaaatcagtttcaaacacaacaagctcgaactgtcgttcaaagacaattcagtgaggtgtggaaaccttcaccacaagtaactgttaggttccctgacagtgactttaaggtgtacaggtacaatgcggtattagacccgctagtcacagcactgttaggtgcattcgacactagaaatagaataatagaagttgaaaatcaggcgaaccccacgactgccgaaacgttagatgctactcgtagagtagacgacgcaacggtggccataaggagcgcgataaataatttaatagtagaattgatcagaggaaccggatcttataatcggagctctttcgagagctcttctggtttggtttggacctctggtcctgcaacttga

SEQ ID NO: 1446 - DNA, 795 bp, Soybean mosaic virus
  source 1..795: mol_type = other DNA
tcaggcaaggagaaggaaggagacatggatgcaggtaaggatccaaagaagaataccagcagtagcaaaggagctggtacaagcagcaaagatgtaaatgttggatcaaaaggaaaggtggttccgcgtttgcagaagattacaaggaagatgaatcttccaatggttgaagggaagatcattcttagcttggaccacttgcttgagtacaaacctaatcaggttgatttattcaatactcgagcaacaagaacacagtttgaagcgtggtacaatgcagttaaagatgaatatgagcttgatgatgagcagatgggtgtggtcatgaatggtttcatggtttggtgtattgacaatggcacttctccagatgccaatggcgtgtgggtgatgatggatggagaggaacagattgaatatccgctgaagccaattgtcgaaaatgcaaaaccaactttgagacaaatcatgcatcatttttcagatgcagcagaagcttacattgagatgagaaattctgaaagtccgtatatgcctagatatggactgttaaggaatttgagagatagagagctagcccgctatgcttttgacttctatgaggtcacttctaaaacaccaaacagggcaagggaagcaatagcgcaaatgaaggctgcagctctctcgggagttaacaacaagttgtttggacttgatggaaatatctcaaccaactccgaaaatactgaaaggcacactgcaagggatgtgaatcaaaacatgcacactcttctgggcatgggcccaccgcag

SEQ ID NO: 1447 - DNA, 654 bp, Cucumber mosaic virus
  source 1..654: mol_type = other DNA
atggacaaatctgaatcaaccagtgccggtcgtaatcgtcgacgtcgtctgcgtcgcggttcccgctccgcctcctcctccgcggatgctacatttagagtcctgtcgcaacagctttcgcgacttaataagacgttagcagctggtcgtcctactattaaccacccaacctttgtgggtagtgagcgttgtaaacctggatacacgttcacctcgattaccctgaagccaccgaaaatagacaaggggtcttattatggcaaaaggttgttacttcctgattcagtcactgagttcgataagaagcttgtttcgcgcattcaaattcgagttaatcctttgccgaaatttgattctaccgtgtgggtgacggtccgtaaagttcctgcctcctcggacctgtctgtatccgccatctctgctatgtttgcggacggagcctcaccggtactggtttatcagtatgctgcatctggcgttcaagccaataacaaattgttatatgatctttcagtgatgcgcgctgatattggtgacatgagaaagtacgccgtgctcgtgtattcaaaagacgatgcgcttgagacggacgaactagtacttcatatcgacatcgagcaccaacgcattcccacgtctggggtgctcccagtt

SEQ ID NO: 1448 - DNA, 708 bp, Potato virus X
  source 1..708: mol_type = other DNA
atgactacaccagccaacaccactcaagctgtaggatccaccaaatcaactaccaccaccactgcaggcgcaactcctgccaattcagggctattcaccataccagatggggacttcttcagcaccgcaaaggctgtggtcgctagcaatgccgtggccaccaacgaggatctcgccaaaatacaggaaatctggaaggacaagaaaattccttcagacactatggctcaggcagcttgggacttagtgagacactgtgccgacgtcgggtcctctgcccaaactgaaatgataggcaccggtccatactccaatggggtcagccgggctagactggcagctgcaattaaagaggtgtgcacactgaggcagttctgcaaaaagtatgcccccgtggtctggaactggatgctcacaaacaacagcccaccggccaactggcaggcacaaggcttcaagccggagcacaaattcgcagcctttgacttctttgatggagtcactaatcccgcagctatcactcccaaagaggggctcatgagacctccgtctgaagcagaaatgaatgccgcccaaactgctgcctttgtgaagatcaccaaggcgagggcgcaatccaacgactttgccagtctggatgccgcggtcactaggggccgcatcacaggaacgactgttgcagaagcagttgtttcactacccccacca

SEQ ID NO: 1449 - DNA, 774 bp, Tomato spotted wilt virus
  source 1..774: mol_type = other DNA
atgtctaaggttaagctcactaaggaaagcattgttgctttgttgacacaaggcaaagaccttgagtttgaggaagatcagaatctggtagcattcaacttcaagactttttgtctggaaaacatcgaccagatcaagaagatgagcgttatttcatgtctgacattcctaaagaatcgtcagagcataatgaaggttattaagcaaagcgattttacttttggtaaaattaccataaagaaaacttcagacaggattggaggcactgacatgaccttcagaaggcttgatagcttgatcagggtcaggcttgttgaagaaactgggaattctgagaatctcaatactatcaaatctaagattgcttcccatcctttgattcaagcctatggattacctctcgatgatgcaaagtctgtgagacttgccataatgctgggaggtagcttacctcttattgcttcagttgatagctttgagatgatcagtgttgtcttggctatatatcaggatgcaaaatacaaggacctcgggatcgacccaaagaagtatgacaccaaggaagccttaggaaaagtttgcactgtgctgaaaagcaaagcatttgaaatgaatgaagatcaggtgaagaaggggaaagagtatgctgctatacttagctccagcaatcctaatgctaaagggagtgttgctatggaacattacagtgaaactcttaacaagttctatgaaatgttcggggttaaaaagcaggcaaaactcgcagaacttgct

SEQ ID NO: 1450 - DNA, 777 bp, Glycine max
  source 1..777: mol_type = other DNA
atgagtggtagcaacgatggtagcggcagctggagctctaggtttttgaaggtggctagtgcagctgccgctacagccgccgttgccggcggtttatatgccattctttcatcctcaacctctgctagctctgagatggaagtgccgtttggcagcgcacggcctgagagcaacactaagcgacaacaagagtcattctatgagcacgaagaaactgaggatgacgaagaatctgaggaggcagacaatgggaaatggaagaaacctgagagtggttgggtgaagctgaatgtggatggttcacgtattcatgaagaacccgcctctgcgggttgtggtggggttataagggacgaatggggaacatggtgcgtgggctttgatcagaaattggaccccaacatttgtcgacaagcccattatacagagttacaagctattctaacgggcctgaaggtggctcgggaggacatgatcaatgtggaaaaactggttgtggagtcagacagtgagcccgcggtgaacatggtgaagagtgggcttgggtacaagtatcatcgtccagagtataaggttgttcaagacataaataggcttcttaaagatcctaagtggctagcgaggttggattatgttcctaggaaagctaatcgagtcgctaattacctcgccaagcgtgtttgtaaaccgtcttctcctcatgatcatcatcatttcagcaagtatccttgtcccccggattacgattgtgaaaagattttcttggaggataacaat

SEQ ID NO: 1451 - protein, 361 aa, Arabidopsis thaliana
MATGQVLFQRFYCKKSLAKFDVKIVAASCVWLASKLEENPKKARQVIIVFHRMECRRENLPLEHLDMYAKKFSELKVELSRTERHILKEMGFVCHVEHPHKFISNYLATLETPPELRQEAWNLANDSLRTTLCVRFRSEVVACGVVYAAARRFQVPLPENPPWWKAFDADKSSIDEVCRVLAHLYSLPKAQYISVCKDGKPFTFSSRSGNSQGQSATKDLLPGAGEAVDTKCTAGSANNDLKDGMVTTPHEKATDSKKSGTESNSQPIVGDSSYERSKVGDRERESDREKERGRERDRGRSHRGRDSDRDSDRERDKLKDRSHHRSRDRLKDSGGHSDKSRHHSSRDRDYRDSSKDRRRHH

SEQ ID NO: 1452 - protein, 1246 aa, Solanum peruvianum
MAENEIEEMLEHLRRIKSGGDLDWLDILRIEELEMVLRVFRTFTKYNDVLLPDSLVELTKRAKLIGEILHRLFGRIPHKCKTNLNLERLESHLLEFFQGNTASLSHNYELNNFDLSKYMDCLENFLNDVLMMFLQKDRFFHSREQLAKHRSIKELKIVQKKIRFLKYIYAPEINGYVDYEKQECLENRIQFMTNTVGQYCLAVLDYVTEGKLNEENDNFSKPPYLLSLIVLVELEMKKIFHGEVKASKFTQSKTFKDKKLPKGFSHHLHNLLMYLRNKKLENFPNNIAAQNIDVAIEFLLVFLDADVSNHVINGNWLKEVLLKVGAIAGDILYVIQKLLPRSINKDETSNISLCSIQILEKTKDLKAQVETYYKSLKFTPSQFPTFGGLSFLNSLLRKLNEMSTSKSGLGFLMKPLLGNLEKELSSLTSILEKELSSIFRDVVHHEHNIPKDLQRRTINLSYEAEVAIDSILAQYNAFLHIFCSLPTIVKEIKQINAEVTEMWSADIPLNPHYVAAPLKHLPDRHSNLVTDEEVVGFENKAEELIDYLIRGTNELDVVPIVGMGGQGKTTIARKLYNNDIIVSRFDVRAWCIISQTYNRRELLQDIFSQVTGSDDNGATVDVLADMLRRKLMGKRYLIVLDDMWDCMVWDDLRLSFPDDGIRSRIVVTTRLEEVGKQVKYHTDPYSLPFLTTEESCQLLQKKVFQKEDCPPELQDVSQAVAEKCKGLPLVVVLVAGIIKKRKMEESWWNEVKDALFDYLDSEFEEYSLATMQLSFDNLPHCLKPCLLYMGMFSEDARIPASTLISLWIAEGFVENTESGRLMEEEAEGYLMDLISSNLVMLSKRTYKGRVKYCQVHDVVHHFCLEKSREAKFMLAVKGQYIHFQPSDWKGTRVSFSFSEELSKFASLVSKTQKPFHQHLRSLITTNRAKSINDIFSCQISELRLLKVLDLSSYIVEFLSLATFKPLNQLKYLAVQAFEFYFDPGSHLPHIETFIVMNLPYYDILLPVSFWEMKKLRHAHFGKAEFDKQGLSEGSSKLENLRILKNIVGFDRVDVLSRRCPNLQQLQITYFGNNEEPFCPKLENLTQLQQLQLSFARPRTLSGLQLPSNLNKLVLEGIHIGCVIPFIAGLPSLEYLQLHDVCFPQSEEWCLGDITFHKLKLLKLVKLNISRWDVSEESFPLLETLVIKKCIDLEEIPLSFADIPTLEQIKLIGSWKVSLEDSAVRMKEEIKDTEGCDRLHLVKQRSD

SEQ ID NO: 1453 - protein, 861 aa, Solanum lycopersicum
MAEILLTSVINKSVEIAGNLLIQEGKRLYWLKEDIDWLQREMRHIRSYVDNAKAKEAGGDSRVKNLLKDIQELAGDVEDLLDDFLPKIQQSNKFNYCLKRSSFADEFAMEIEKIKRRVVDIDRIRKTYNIIDTDNNNDDCVLLDRRRLFLHADETEIIGLDDDFNMLQAKLLNQDLHYGVVSIVGMPGLGKTTLAKKLYRLIRDQFECSGLVYVSQQPRASEILLDIAKQIGLTEQKMKENLEDNLRSLLKIKRYVILLDDIWDVEIWDDLKLVLPECDSKVGSRMIITSRNSNVGRYIGGESSLHALQPLESEKSFELFTKKIFNFDDNNSWANASPDLVNIGRNIVGRCGGIPLAIVVTAGMLRARERTEHAWNRVLESMGHKVQDGCAKVLALSYNDLPIASRPCFLYFGLYPEDHEIRAFDLINMWIAEKFIVVNSGNRREAEDLAEDVLNDLVSRNLIQLAKRTYNGRISSCRIHDLLHSLCVDLAKESNFFHTAHDAFGDPGNVARLRRITFYSDNVMIEFFRSNPKLEKLRVLFCFAKDPSIFSHMAYFDFKLLHTLVVVMSQSFQAYVTIPSKFGNMTCLRYLRLEGNICGKLPNSIVKLTRLETIDIDRRSLIQPPSGVWESKHLRHLCYRDYGQACNSCFSISSFYPNIYSLHPNNLQTLMWIPDKFFEPRLLHRLINLRKLGILGVSNSTVKMLSIFSPVLKALEVLKLSFSSDPSEQIKLSSYPHIAKLHLNVNRTMALNSQSFPPNLIKLTLAYFSVDRYILAVLKTFPKLRKLKMFICKYNEEKMDLSGEANGYSFPQLEVLHIHSPNGLSEVTCTDDVSMPKLKKLLLTGFHCRISLSERLKKLSK

SEQ ID NO: 1454 - protein, 937 aa, Solanum tuberosum
MAYAAVTSLMRTIHQSMELTGCDLQPFYEKLKSLRAILEKSCNIMGDHEGLTILEVEIVEVAYTTEDMVDSESRNVFLAQNLEERSRAMWEIFFVLEQALECIDSTVKQWMATSDSMKDLKPQTSSLVSLPEHDVEQPENIMVGRENEFEMMLDQLARGGRELEVVSIVGMGGIGKTTLATKLYSDPCIMSRFDIRAKATVSQEYCVRNVLLGLLSLTSDEPDDQLADRLQKHLKGRRYLVVIDDIWTTEAWDDIKLCFPDCYNGSRILLTTRNVEVAEYASSGKPPHHMRLMNFDESWNLLHKKIFEKEGSYSPEFENIGKQIALKCGGLPLAITVIAGLLSKMGQRLDEWQRIGENVSSVVSTDPEAQCMRVLALSYHHLPSHLKPCFLYFAIFTEDEQISVNELVELWPVEGFLNEEEGKSIEEVATTCINELIDRSLIFIHNFSFRGTIESCGMHDVTRELCLREARNMNFVNVIRGKSDQNSCAQSMQRSFKSRSRIRIHKVEELAWCRNSEAHSIIMLGGFECVTLELSFKLVRVLDLGLNTWPIFPSGVLSLIHLRYLSLRFNPCLQQYQGSKEAVPSSIIDIPLSISSLCYLQTFKLNLPFPSYYPFILPSEILTMPQLRTLCMGWNYLRSHEPTENRLVLKNLQCLNQLNPRYCTGSFFRLFPNLKKLQVFGVPEDFRNSQDLYDFRYLYQLEELTFRLYYPYAACFLKNTAPSGSTQDPLRFQTEILHKEIDFGGTAPPTLLLPPPDAFPQNLKSLTFRGEFSVAWKDLSIVGKLPKLEVLILSWNAFIGKEWEVVEEGFPHLKFLFLDDVYIRYWRASSDHFPYLERVILRDCRNLDSIPRDFADITTLALIDIDYCQQSVVNSAKQIQQDIQDNYGSSIEVHTRHLFIPKSVTTVEDDDDSVTTDEDDDDDDFEKEVASCRNNVE

SEQ ID NO: 1455 - protein, 159 aa, Tobacco mosaic virus; identical to SEQ ID NO: 26

SEQ ID NO: 1456 - protein, 265 aa, Soybean mosaic virus
SGKEKEGDMDAGKDPKKNTSSSKGAGTSSKDVNVGSKGKVVPRLQKITRKMNLPMVEGKIILSLDHLLEYKPNQVDLFNTRATRTQFEAWYNAVKDEYELDDEQMGVVMNGFMVWCIDNGTSPDANGVWVMMDGEEQIEYPLKPIVENAKPTLRQIMHHFSDAAEAYIEMRNSESPYMPRYGLLRNLRDRELARYAFDFYEVTSKTPNRAREAIAQMKAAALSGVNNKLFGLDGNISTNSENTERHTARDVNQNMHTLLGMGPPQ

SEQ ID NO: 1457 - protein, 218 aa, Cucumber mosaic virus
MDKSESTSAGRNRRRRLRRGSRSASSSADATFRVLSQQLSRLNKTLAAGRPTINHPTFVGSERCKPGYTFTSITLKPPKIDKGSYYGKRLLLPDSVTEFDKKLVSRIQIRVNPLPKFDSTVWVTVRKVPASSDLSVSAISAMFADGASPVLVYQYAASGVQANNKLLYDLSVMRADIGDMRKYAVLVYSKDDALETDELVLHIDIEHQRIPTSGVLPV

SEQ ID NO: 1458 - protein, 236 aa, Potato virus X
MTTPANTTQAVGSTKSTTTTTAGATPANSGLFTIPDGDFFSTAKAVVASNAVATNEDLAKIQEIWKDKKIPSDTMAQAAWDLVRHCADVGSSAQTEMIGTGPYSNGVSRARLAAAIKEVCTLRQFCKKYAPVVWNWMLTNNSPPANWQAQGFKPEHKFAAFDFFDGVTNPAAITPKEGLMRPPSEAEMNAAQTAAFVKITKARAQSNDFASLDAAVTRGRITGTTVAEAVVSLPPP

SEQ ID NO: 1459 - protein, 258 aa, Tomato spotted wilt virus
MSKVKLTKESIVALLTQGKDLEFEEDQNLVAFNFKTFCLENIDQIKKMSVISCLTFLKNRQSIMKVIKQSDFTFGKITIKKTSDRIGGTDMTFRRLDSLIRVRLVEETGNSENLNTIKSKIASHPLIQAYGLPLDDAKSVRLAIMLGGSLPLIASVDSFEMISVVLAIYQDAKYKDLGIDPKKYDTKEALGKVCTVLKSKAFEMNEDQVKKGKEYAAILSSSNPNAKGSVAMEHYSETLNKFYEMFGVKKQAKLAELA

SEQ ID NO: 1460 - protein, 259 aa, Glycine max
MSGSNDGSGSWSSRFLKVASAAAATAAVAGGLYAILSSSTSASSEMEVPFGSARPESNTKRQQESFYEHEETEDDEESEEADNGKWKKPESGWVKLNVDGSRIHEEPASAGCGGVIRDEWGTWCVGFDQKLDPNICRQAHYTELQAILTGLKVAREDMINVEKLVVESDSEPAVNMVKSGLGYKYHRPEYKVVQDINRLLKDPKWLARLDYVPRKANRVANYLAKRVCKPSSPHDHHHFSKYPCPPDYDCEKIFLEDNN

SEQ ID NO: 1461 - DNA, 3774 bp, Solanum lycopersicum
  source 1..3774: mol_type = other DNA
atggaaaaacgaaaagatattgaagaagcaaacaactcattggtgttattttctgctcttagcaaggacattgccaatgttctaattttcctagagaatgaggaaaatcaaaaagctcttgacaaagatcaagttgaaaagctaaaattgaaaatggcatttatttgtacatatgttcagctttcttattccgattttgagcagtttgaagatataatgactagaaatagacaagaggttgagaatctgcttcaatcacttttggatgatgatgtccttactagcctcaccagtaatatggatgactgtatcagcttgtatcatcgttcttataaatcagatgccatcatgatggatgagcaattggacttcctcctcttgaatctgtatcatctatccaagcatcacgctgaaaagatatttcctggagtgactcaatatgaagttcttcagaatgtatgtggcaacataagagatttccatgggttgatactgaatggttgcattaagcatgagatggttgagaatgtcttacctctgtttcaactcatggctgaaagagtaggacacttcctttgggaggatcagactgatgaagactctcggctctccgagctagatgaggatgaacacaatgatagagactctcgactcttccagctaacacatctactcttgaagattgttccaactgaactggaggttatgcacatatgttatacaaatttgaaagcttcaacttcagcagaagttggacgcttcattaagaagctcctggaaacctcaccggatattctcagagaatatatcattcaactacaagagcatatgttaactgttattccccctagcactttaggggctcgaaacattcatgtcatgatggaattcctattacttattctttctgatatgcccaaggactttattcatcatgacaaactttttgatctcttggctcatgttggaacacttaccagggaggtatcgactcttgtacgtgacttggaagagaaattaaggaataaagagggtaataaccaaacaaattgtgcaaccctagacttgctggaaaatattgaactcctcaagaaagatctcaaacatgtttatctgaaagccccaaattcatctcaatgttgcttccccatgagtgatggaccactcttcatgcatcttctacacatgcacttaaatgatttgctagattctaatgcttattcaatttctttgataaaggaagaaatcgagttggtgagtcaagaactggaattcataagatcattctttggggatgctgctgagcaaggattgtataaagatatctgggcacgtgttctagatgtggcttatgaggcaaaagatgtcatagattcaattattgttcgagataatggtctcttacatcttattttctcacttcccattaccataaagaagatcaaacttatcaaagaagagatctctgctttagatgagaacattcccaaggacagaggtctaatcgttgtgaactctcccaagaaaccagttgagagaaagtcattgacaactgataaaataattgtaggttttgaggaggagacaaacttgatacttagaaagctcaccagtggacccgcagatttagatgtcatttcgatcaccggtatgccgggttcaggtaaaactactttggcatacaaagtatacaatgataagtcagtttctagacattttgaccttcgtgcatggtgcacggtcgatcaaggatatgacgacaagaagttgttggatacaattttcagtcaagttagtggctcagattcaaatttgagtgagaatattgatgttgctgataaattgcggaaacaactgtttggaaagaggtatcttattgtcttagatgatgtgtgggatactactacattggatgagttgacaagaccttttcctgaagctaagaaaggaagtaggattattttgacaactcgagaaaaggaagtggctttgcatggaaagctgaacactgatcctcttgaccttcgattgctaagaccagatgaaagttgggaacttttagataaaaggacatttggtaatgagagttgccctgatgaactattagatgtcggtaaagaaatagccgaaaattgtaaagggcttcctttggtggctgatctgattgctggagtcattgctgggagggaaaagaaaaggagtgtgtggcttgaagttcaaagtagtttgagttcttttattttgaacagtgaagtggaagtgatgaaagttatagaattaagttatgaccatttaccacatcacctcaagccatgcttgcttcactttgcaagttggccgaaggacactcctttgacaatctatttgtttactgtttatttgggtgctgaaggatttgtggaaaagacggagatgaagggtatagaagaagtggtgaagatttatatggatgatttaatttccagtagcttggtaatttgtttcaatgagataggtgatatactgaatttccaaattcatgatcttgtgcatgacttttgtttgataaaagcaagaaaggaaaatttgtttgatcggataagatcaagtgctccatcagatttgttgcctcgtcaaattaccattgattatgatgaggaggaggagcactttgggcttaattttgtcatgttcgattcaaataagaaaaggcattctggtaaacacctctattctttgaggataaatggagaccagctggatgacagtgtttctgatgcatttcacctaagacacttgaggcttattagagtgttggacctggaaccctctttaatcatggtgaatgattctttgctgaatgaaatatgcatgttgaatcatttgaggtacttaagaattcggacacaagttaaatatctgcctttctctttctcaaacctctggaatctagaaagtctgtttgtgtctaacaaaggatcaatcttggtactattaccgagaattttggatcttgtaaagttgcgagtgctgtccgtgggtgcttgttctttctttgatatggatgcagatgaatcaatattgatagcaaaggacacaaagttagagaacttgagaatattaggggaactgttgatttcctattcgaaagatacaatgaatattttcaaaaggtttcccaatcttcaggtgcttcagtttgaactcaaggagtcatgggattattcaacagagcaacattggttcccgaaattggattgcctaactgaactagaaacactctgtgtaggttttaaaagttcaaacacaaaccactgtgggtcctctgttgtgacaaatcggccgtgggattttcacttcccttcaaatttgaaagaactgttgttgtatgactttcctctgacatccgattcactatcaacaatagcgagactgcccaaccttgaaaatttgtccctttatgatacaatcatccagggagaagaatggaacatgggggaggaagacacttttgagaatctcaaatttttgaacttgcgtctactgactctttccaagtgggaggttggagaggaatccttccccaatcttgagaaattaaaactgcaggaatgtggtaagcttgaggagattccacctagttttggagatatttattcattgaaatttatcaaaattgtaaagagtcctcaacttgaagattctgctctcaagattaagaaatacgctgaagatatgagaggagggaacgatcttcagatccttggccagaagaatatccccttatttaagtag

SEQ ID NO: 1462 - DNA, 2739 bp, Glycine max
  source 1..2739: mol_type = other DNA
atggcttatgctgctgttacttcccttatgagaaccatacatcaatcaatggaacttactggatgtgatttgcaaccgttttatgaaaagctcaaatctttgagagctattctggagaaatcctgcaatataatgggcgatcatgaggggttaacaatcttggaagttgaaatcatagaggtagcatacacaacagaagatatggttgactcggaatcaagaaatgtttttttagcacggaatgtggggaaaagaagcagggctatgtgggggatttttttcgtcttggaacaagcactagaatgcattgattccaccgtgaaacagtggatggcaacatcggacagcatgaaagatctaaaaccacaaactagctcacttgtcagtttacctgaacatgatgttgagcagcccgagaatataatggttggccgtgaaaatgaatttgagatgatgctggatcaacttgctagaggaggaagggaactagaagttgtctcaatcgtagggatgggaggcatcgggaaaacaactttggctgcaaaactctatagtgatccttacattatgtctcgatttgatattcgtgcaaaagcaactgtttcacaagagtattgtgtgagaaatgtactcctaggccttctttctttgacaagtgatgaacctgattatcagctagcggaccaactgcaaaagcatctgaaaggcaggagatacttggtagtcattgatgacatatggactacagaagcttgggatgatataaaactatgtttcccagactgcgataatggaagcagaatactcctgactactcggaatgtggaagtggctgaatatgctagctcaggtaagcctcctcatcacatgcgcctcatgaattttgacgaaagttggaatttactacacaaaaagatctttgaaaaagaaggttcttattctcctgaatttgaaaatattgggaaacaaattgcattaaaatgtggagggttacctctagcaattactttgattgctggacttctctccaaaatcagtaaaacattggatgagtggcaaaatgttgcggagaatgtacgttcggtggtaagcacagatcttgaagcaaaatgcatgagagtgttggctttgagttaccatcacttgccttctcacctaaaaccgtgttttctgtattttgcaattttcgcagaggatgaacggatttatgtaaataaacttgttgagttatgggccgtagaggggtttttgaatgaagaagagggaaaaagcatagaagaggtggcagaaacatgtataaacgaacttgtagatagaagtctaatttctatccacaatgtgagttttgatggggaaacacagagatgtggaatgcatgatgtgacccgtgaactctgtttgagggaagctcgaaacatgaattttgtgaatgttatcagaggaaagagtgatcaaaattcatgtgcacaatccatgcagtgttcctttaagagtcgaagtcggatcagtatccataatgaggaagaattggtttggtgtcgtaacagcgaggctcattctatcatcacgttgtgtatattcaaatgcgtcacactggaattgtctttcaagctagtaagagtactagatcttggtttgactacatgcccaatttttcccagtggagtactttctctaattcatttgagatacctatctttgcgttttaatcctcgcttacagcagtatcgaggatcgaaagaagctgttccctcatcaataatagacattcctctatcgatatcaagcctatgctatctgcaaacttttaaactttaccatccatttcccaattgttatcctttcatattaccatcggaaattttgacaatgccacaattgaggaagctgtgtatgggctggaattacttgcggagtcatgagcctacagagaacagattggttttgaaaagtttgcaatgcctcaatgaattgaatcctcggtattgtacagggtcttttttaagactatttcccaatttaaagaagttggaagtatttggcgtcaaagaggactttcgcaatcacaaggacctgtatgattttcgctacttatatcagctcgagaaattggcatttagtacttattattcatcttctgcttgctttctaaaaaacactgcacctttaggttctactccgcaagatcctctgaggtttcagatggaaacattgcacttagagactcattccagggcaactgcacctccaactgatgttccaactttcctcttacctcctccggattgttttccacaaaaccttaagagtttaacttttagcggagatttctttttggcatggaaggatttgagcattgttggtaaattacccaaactcgaggtccttcaactatcacacaatgccttcaaaggcgaggagtgggaagtagttgaggaagggtttcctcacttgaagttcttgtttctggatagcatatacattcggtactggagagctagtagtgatcactttccataccttgaacgactttttcttagcgattgcttttatttggattcaatccctcgagattttgcagatataaccacactagctcttattgatatatttcgctgccaacaatctgttgggaattccgccaagcaaattcaacaggacattcaagacaactatggaagctctatcgaggtccatactcgttatctttatcgaaatggagcatttttggtagtgtga

SEQ ID NO: 1463 - DNA, 2565 bp, Glycine max
  source 1..2565: mol_type = other DNA
atggtagtagcagtggagaaaaccaacctcacttcacaatcacaatgcttcaaccgtgtttctgacaagaagaaagaaagatgcaagacacacatgaacaacgttaacccatgttgttttttgtttctcttatgtgtgtggagccttgttgtgctcccctcatgcgtgaggccagttttgtgtgaagatgaaggttgggatggagtggttgtgacagcatcaaacctcttagcacttgaagctttcaagcaagagttggttgatccagaagggttcttgcggagctggaatgacagtggctatggagcttgttccggaggttgggttggaatcaagtgtgctaagggacaggttattgtgatccagcttccttggaagggtttgaggggtcgaatcaccgacaaaattggtcaacttcaaggcctcaggaagcttagtcttcatgataaccaaattggtggttcaatcccttcaactttgggacttcttcccaaccttagaggggttcagttattcaacaataggcttacaggttccatacctctttctttaggtttctgccctttgcttcagtctcttgacctcagcaacaacttgctcacaggagcaatcccttatagtcttgctaattccactaagctttattggcttaacttgagtttcaactccttctctggtcctttaccagctagcctaactcactcattttctctcacttttctttctcttcaaaataacaatctttctggctcccttcctaactcttggggtgggaattccaagaatggcttctttaggcttcaaaatttgatcctagatcataactttttcactggtgacgttcctgcttctttgggtagcttaagagagctcaatgagatttcccttagtcataataagtttagtggagctataccaaatgaaataggaaccctttctaggcttaagacacttgacatttctaataatgccttgaatgggaacttgcctgctaccctatctaatttatcctcacttacactgctgaatgcagagaacaacctccttgacaatcaaattcctcaaagtttaggtagattgcgtaatctttctgttctgattttgagtagaaaccaatttagtggacatattccttcaagtattgcaaacatttcctcgcttaggcagcttgatttgtcactgaataatttcagtggagaaattccagtctcctttgacagtcagcgcagtctaaatctcttcaatgtttcctacaatagcctctcaggttctgtcccccctctgcttgccaagaaatttaactcaagctcatttgtgggaaatattcaactatgtggatacagcccttcaaccccatgtctttcccaagctccatcacaaggagtcattgccccacctcctgaagtgtcaaaacatcaccatcataggaagctaagcaccaaagacataattctcatagtagcaggagttctcctcgtagtcctgattatactttgttgtgtcctgcttttctgcctgatcagaaagagatcaacatctaaggccgggaacggccaagccaccgagggtagagcggccactatgaggacagaaaaaggagtccctccagttgctggtggtgatgttgaagcaggtggggaggctggagggaaactagtccattttgatggaccaatggcttttacagctgatgatctcttgtgtgcaacagctgagatcatgggaaagagcacctatggaactgtttataaggctattttggaggatggaagtcaagttgcagtaaagagattgagggaaaagatcactaaaggtcatagagaatttgaatcagaagtcagtgttctaggaaaaattagacaccccaatgttttggctctgagagcctattacttgggacccaaaggggaaaagcttctggtttttgattacatgtctaaaggaagtcttgcttctttcctacatggtggtggaactgaaacattcattgattggccaacaagaatgaaaatagcacaagacttggcccgtggcttgttctgccttcattcccaggagaacatcatacatgggaacctcacatccagcaatgtgttgcttgatgagaatacaaatgctaaaattgcagattttggtctttctcggttgatgtcaactgctgctaattccaacgtgatagctacagctggagcattgggataccgggcacctgagctctcaaagctcaagaaagcaaacactaaaactgatatctacagtcttggtgttatcttgttagaactcctaacgaggaaatcacctggggtgtctatgaatggactagatttgcctcagtgggttgcctcagttgtcaaagaggagtggacaaatgaggtttttgatgcagacttgatgagagatgcatccacagttggcgacgagttgctaaacacgttgaagctcgctttgcactgtgttgatccttctccatcagcacgaccagaagttcatcaagttctccagcagctggaagagattagaccagagagatcagtcacagccagtcccggggacgatatcgtatag

SEQ ID NO: 1464 - DNA, 2763 bp, Glycine max
  source 1..2763: mol_type = other DNA
atgtctctccccaaaaccctactttctctcttccttctcctcacgatccccctagtaaccgccgatgacgccgcggtgatgtcgaattttctcaaatccctcactccaccgccctcgggctggtctgaaacaaccccattctgccaatggaagggtatccaatgcgattcatccagccacgtgaccagcataagcctcgcttcgcattccctcaccggaacactcccctcggatctcaattccctctctcaactccgcactctctccctccaagacaattccctcaccggcaccctcccttctctctccaacctttctttcctccaaaccgtctacttaaaccgcaacaacttctcctccgtgtcccccaccgctttcgcctccctaacctccctccaaaccctcagcctcggctccaaccctgctctccaaccctggtccttccccaccgacctcacttcctcctctaacctaatcgacctcgacctcgccaccgtatccctcaccggtcccttgccggacattttcgacaaattcccttcccttcaacaccttcgcctctcttacaacaacctcaccggcaatttaccctcctctttctccgccgccaacaatctcgaaacgctctggctcaacaaccaggccgccggcttgtccggtaccctcctcgtcctctccaacatgtctgcattaaaccagtcctggctcaataagaaccagttcaccggttccataccggatttatcgcaatgcacggctttgtctgacttgcagctcagggataaccagttaactggtgtggttcccgcttcattgacaagtcttcctagtttgaagaaagtttctctggataataatgagcttcaggggcctgtgcccgtgtttgggaaaggtgtgaatgttactctcgatgggattaatagtttttgtcttgatactcctgggaattgtgatcccagggtgatggttttgctgcagattgccgaggcattcgggtatccaattcggttggcagagtcgtggaaggggaatgatccgtgtgatggttggaactatgttgtgtgtgctgccggaaagattattactgtcaatttcgagaaacagggtttgcagggtaccatctcccctgcatttgccaatttgactgacttgaggactttgtttctcaatggcaataatttgatcggttctatacctgatagtttgatcactttgcctcagcttcagactcttgatgtgtctgacaacaacctctctggattggttcctaagttcccaccaaaggtgaagttggtgactgcgggaaatgctttgcttgggaaaccccttagtcctggaggtggaccaagtggaactactccttctgggtcttcgaccggtggaagtggtggtgaatcctcaaagggtaattcttcggtgtcgccaggttggattgctggtatagttgttattgtgttgttttttattgcagtggtgttgtttgtgtcttggaagtgttttgtcaacaagctgcaggggaagttcagtagggttaaaggtcatgaaaatgggaaaggaggctttaaacttgatgctgtccatgtttctaatggatatggtggtgttccagttgagttgcaaagccagagcagtggtgatcgcagtgaccttcatgctttagatggtccaacattttctatccaagttcttcgacaagtgacgaataatttcagcgaggagaacattttaggcaggggagggtttggagtagtttataagggggtgttgcatgatggaacaaaaattgctgttaagaggatggaatctgttgcaatggggaacaaaggtcagaaagagttcgaagcagagattgcacttcttagtaaagttaggcatagacatttggttgctcttctagggtattgcatcaatggcaatgaaaggcttttggtgtatgagtatatgcctcaaggtacattaacacagcacctgtttgagtggcaggagcatgggtatgctcctttgacttggaagcaaagggtagtaatagctttggatgtagcgcggggggtggaatacttgcacagtttagctcagcaaagcttcattcatagagacttaaaaccctcaaacatactactaggcgatgacatgagagcaaaggttgctgattttgggttggttaaaaatgcaccagatgggaagtattctgttgagacacggttggctggaacatttggatatcttgcacctgagtatgcagctactggaagagtgacaaccaaagtggatgtttatgcatttggagtagttctgatggaacttatcaccggtagaaaggcattggatgatactgtgccagatgaaaggtctcacttggtgacatggttccgtagggtactaattaacaaggaaaacattccaaaggcaattgatcaaattctcaatccagatgaggaaaccatgggaagcatatatacagtggccgagctggcaggccattgcactgctcgcgaaccataccaaaggccggatatgggtcatgcagtgaacgtcttggttcctcttgtggagcaatggaaacctactagccatgatgaagaagaggaagacggctctggcggtgaccttcatatgagccttcctcaagctctacgaaggtggcaagccaacgaaggcacttcctcaatatttaatgacatttccatctcacaaacccaatcaagcatctcctctaaacctgcagggtttgcagactcctttgattcaatggattgccgttaa

SEQ ID NO: 1465 - DNA, 405 bp, Zea mays
  source 1..405: mol_type = other DNA
atgcgcaaacatcgaatcgtctcactcgtggctgccctgctcatactgcttgccctcgccgtatcgtccaaccgcaacgcacaggaggattccatggccgacaacaccgggacgttggtgggcggcatccaggacgtgccggagaacgagaacgaccttcacctccaggagctcgcccgcttcgccgtcgatgagcacaacaagaaggccaatgctcttctggggttcgagaagcttgtgaaggccaagacacaagtggttgctggcacgatgtactatctcactattgaagtgaaggatggcgaagtcaagaagctctacgaagctaaggtctgggagaagccatgggagaagttcaaggagctgcaggaattcaagcctgttgaagagggtgctagcgcctaa

SEQ ID NO: 1466 - DNA, 618 bp, Colocasia esculenta
  source 1..618: mol_type = other DNA
atggccttgatggggggcatcgtggatgtggagggagcgcagaacagcgccgaagtagaggagctcgcccgcttcgccgtcgacgaacacaataagaaggagaatgcgcttctgcagttctcccggcttgtgaaggcgaagcaacaggtggtttcgggcattatgcatcacctcactgtggaggttatcgaaggtggcaagaagaaagtgtatgaagccaaggtctgggtccaggcttggcttaactccaagaagcttcatgagttcagccccattggcgattcatcctcggttacgccagcagatctcggtgtaaaacgggatgcgcacgaagcggaatggctagagataccaacacatgatcctgtcgtccaagacgcagcaaaccatgcggtgaagagcatccagcaaagatccaatactttgttcccttatgaactgttggagatccttcatgcaaaggctaaggtgcttgaggacctcgccaaaatccatttgctactcaaacttaagaggggaagcagggaggagaagttcaaggtggaagtgcacaagaacattgaggggactttccatctgaatcagatggagcaagatcattcagactctggaaactag

SEQ ID NO: 1467 - DNA, 1434 bp, Bacillus thuringiensis
  source 1..1434: mol_type = other DNA
atggccatcgatagcaagactactttgcctaggcattcacttatccatacaatcaagctgaactctaacaagaagtatggtcctggtgacatgactaacggaaatcagttcatcatctcaaagcaggagtgggctactatcggagcctacatccagactggacttggattgccagtgaacgagcagcagttgaggacacatgttaacttgtctcaggatatctcaatccctagtgatttctctcagttgtatgacgtttactgttctgataagactagtgcagagtggtggaacaagaacttgtatcctttgatcatcaagtctgctaacgacatcgcttcatacggtttcaaggtggctggtgatccttctatcaagaaggatggatatttcaagaagttgcaggacgagcttgataacatcgttgataacaactctgatgacgacgcaatcgctaaggctatcaaggatttcaaggctagatgtggtatcttgatcaaggaagctaagcagtatgaggaagctgccaagaacatcgtgacatctctcgatcagttcttacatggtgatcagaagaagttagaaggtgttatcaacatccagaagaggttgaaggaagtgcagacagctcttaaccaggctcatggagagtctagtccagctcataaggagctcttggagaaagtgaagaacttgaagacaacattagagaggactatcaaggctgagcaggaccttgagaagaaagtggagtatagcttcttgttaggaccattgttgggattcgtggtttacgagatccttgagaacactgctgttcagcatatcaagaaccagatcgatgagatcaagaagcagttggattctgctcagcatgatttggacagggacgtgaagattatcggaatgttgaacagtatcaacacagatatcgacaacctttactctcaaggacaggaagcaatcaaggttttccagaagttgcaaggaatctgggctactatcggtgctcagatcgagaaccttaggacaacatcattgcaagaggttcaggactctgatgacgctgatgagatccagatcgaactcgaggacgcttctgacgcttggttggttgtggctcaggaggctagggatttcacacttaacgcttactcaactaactctaggcagaaccttccaatcaacgttatctcagattcatgtaactgttcaacaacaaacatgacatcaaaccaatacagcaatccaacaacaaacatgacatcaaaccagtacatgatctcacatgagtacacaagcttgccaaacaacttcatgttgtcaaggaactctaacttggaatacaagtgtcctgagaacaacttcatgatctattggtacaacaactctgactggtacaacaactctgattggtacaacaaccctccataa

SEQ ID NO: 1468 - protein, 587 aa, Bacillus thuringiensis
KDQQLFNAIMDAVNKMVDNKFLSYNLSTLNKTIEGLQGNLGLFQNAIQVAICQGSTPERVNFDQNCTPCNPNQPCKDDLDRVASRFDTANSQFTQHLPEFKNPWSDENSTQEFKRTSVELTLPMYTTVATLHLLLYEGYIEFMTKWNFHNEQYLNNLKVELQQLIHSYSETVRTSFLQFLPTLNNRSKSSVNAYNRYVRNMTVNCLDIAATWPTFDTHNYHQGGKLDLTRIILSDTAGPIEEYTTGDKTSGPEHSNITPNNILDTPSPTYQHSFVSVDSIVYSRKELQQLDIATYSTNNSNNCHPYGLRLSYTDGSRYDYGDNQPDFTTSNNNYCHNSYTAPITLVNARHLYNAKGSLQNVESLVVSTVNGGSGSCICDAWINYLRPPQTSKNESRPDQKINVLYPITETVNKGTGGNLGVISAYVPMELVPENVIGDVNADTKLPLTQLKGFPFEKYGSEYNNRGISLVREWINGNNAVKLSNSQSVGIQITNQTKQKYEIRCRYASKGDNNVYFNVDLSENPFRNSISFGSTESSVVGVQGENGKYILKSITTVEIPAGSFYVHITNQGSSDLFLDRIEFVPKIQ

SEQ ID NO: 1469 - protein, 1257 aa, Solanum lycopersicum
MEKRKDIEEANNSLVLFSALSKDIANVLIFLENEENQKALDKDQVEKLKLKMAFICTYVQLSYSDFEQFEDIMTRNRQEVENLLQSLLDDDVLTSLTSNMDDCISLYHRSYKSDAIMMDEQLDFLLLNLYHLSKHHAEKIFPGVTQYEVLQNVCGNIRDFHGLILNGCIKHEMVENVLPLFQLMAERVGHFLWEDQTDEDSRLSELDEDEHNDRDSRLFQLTHLLLKIVPTELEVMHICYTNLKASTSAEVGRFIKKLLETSPDILREYIIQLQEHMLTVIPPSTLGARNIHVMMEFLLLILSDMPKDFIHHDKLFDLLAHVGTLTREVSTLVRDLEEKLRNKEGNNQTNCATLDLLENIELLKKDLKHVYLKAPNSSQCCFPMSDGPLFMHLLHMHLNDLLDSNAYSISLIKEEIELVSQELEFIRSFFGDAAEQGLYKDIWARVLDVAYEAKDVIDSIIVRDNGLLHLIFSLPITIKKIKLIKEEISALDENIPKDRGLIVVNSPKKPVERKSLTTDKIIVGFEEETNLILRKLTSGPADLDVISITGMPGSGKTTLAYKVYNDKSVSRHFDLRAWCTVDQGYDDKKLLDTIFSQVSGSDSNLSENIDVADKLRKQLFGKRYLIVLDDVWDTTTLDELTRPFPEAKKGSRIILTTREKEVALHGKLNTDPLDLRLLRPDESWELLDKRTFGNESCPDELLDVGKEIAENCKGLPLVADLIAGVIAGREKKRSVWLEVQSSLSSFILNSEVEVMKVIELSYDHLPHHLKPCLLHFASWPKDTPLTIYLFTVYLGAEGFVEKTEMKGIEEVVKIYMDDLISSSLVICFNEIGDILNFQIHDLVHDFCLIKARKENLFDRIRSSAPSDLLPRQITIDYDEEEEHFGLNFVMFDSNKKRHSGKHLYSLRINGDQLDDSVSDAFHLRHLRLIRVLDLEPSLIMVNDSLLNEICMLNHLRYLRIRTQVKYLPFSFSNLWNLESLFVSNKGSILVLLPRILDLVKLRVLSVGACSFFDMDADESILIAKDTKLENLRILGELLISYSKDTMNIFKRFPNLQVLQFELKESWDYSTEQHWFPKLDCLTELETLCVGFKSSNTNHCGSSVVTNRPWDFHFPSNLKELLLYDFPLTSDSLSTIARLPNLENLSLYDTIIQGEEWNMGEEDTFENLKFLNLRLLTLSKWEVGEESFPNLEKLKLQECGKLEEIPPSFGDIYSLKFIKIVKSPQLEDSALKIKKYAEDMRGGNDLQILGQKNIPLFK

SEQ ID NO: 1470 - protein, 912 aa, Glycine max
MAYAAVTSLMRTIHQSMELTGCDLQPFYEKLKSLRAILEKSCNIMGDHEGLTILEVEIIEVAYTTEDMVDSESRNVFLARNVGKRSRAMWGIFFVLEQALECIDSTVKQWMATSDSMKDLKPQTSSLVSLPEHDVEQPENIMVGRENEFEMMLDQLARGGRELEVVSIVGMGGIGKTTLAAKLYSDPYIMSRFDIRAKATVSQEYCVRNVLLGLLSLTSDEPDYQLADQLQKHLKGRRYLVVIDDIWTTEAWDDIKLCFPDCDNGSRILLTTRNVEVAEYASSGKPPHHMRLMNFDESWNLLHKKIFEKEGSYSPEFENIGKQIALKCGGLPLAITLIAGLLSKISKTLDEWQNVAENVRSVVSTDLEAKCMRVLALSYHHLPSHLKPCFLYFAIFAEDERIYVNKLVELWAVEGFLNEEEGKSIEEVAETCINELVDRSLISIHNVSFDGETQRCGMHDVTRELCLREARNMNFVNVIRGKSDQNSCAQSMQCSFKSRSRISIHNEEELVWCRNSEAHSIITLCIFKCVTLELSFKLVRVLDLGLTTCPIFPSGVLSLIHLRYLSLRFNPRLQQYRGSKEAVPSSIIDIPLSISSLCYLQTFKLYHPFPNCYPFILPSEILTMPQLRKLCMGWNYLRSHEPTENRLVLKSLQCLNELNPRYCTGSFLRLFPNLKKLEVFGVKEDFRNHKDLYDFRYLYQLEKLAFSTYYSSSACFLKNTAPLGSTPQDPLRFQMETLHLETHSRATAPPTDVPTFLLPPPDCFPQNLKSLTFSGDFFLAWKDLSIVGKLPKLEVLQLSHNAFKGEEWEVVEEGFPHLKFLFLDSIYIRYWRASSDHFPYLERLFLSDCFYLDSIPRDFADITTLALIDIFRCQQSVGNSAKQIQQDIQDNYGSSIEVHTRYLYRNGAFLVV

SEQ ID NO: 1471 - protein, 854 aa, Glycine max
MVVAVEKTNLTSQSQCFNRVSDKKKERCKTHMNNVNPCCFLFLLCVWSLVVLPSCVRPVLCEDEGWDGVVVTASNLLALEAFKQELVDPEGFLRSWNDSGYGACSGGWVGIKCAKGQVIVIQLPWKGLRGRITDKIGQLQGLRKLSLHDNQIGGSIPSTLGLLPNLRGVQLFNNRLTGSIPLSLGFCPLLQSLDLSNNLLTGAIPYSLANSTKLYWLNLSFNSFSGPLPASLTHSFSLTFLSLQNNNLSGSLPNSWGGNSKNGFFRLQNLILDHNFFTGDVPASLGSLRELNEISLSHNKFSGAIPNEIGTLSRLKTLDISNNALNGNLPATLSNLSSLTLLNAENNLLDNQIPQSLGRLRNLSVLILSRNQFSGHIPSSIANISSLRQLDLSLNNFSGEIPVSFDSQRSLNLFNVSYNSLSGSVPPLLAKKFNSSSFVGNIQLCGYSPSTPCLSQAPSQGVIAPPPEVSKHHHHRKLSTKDIILIVAGVLLVVLIILCCVLLFCLIRKRSTSKAGNGQATEGRAATMRTEKGVPPVAGGDVEAGGEAGGKLVHFDGPMAFTADDLLCATAEIMGKSTYGTVYKAILEDGSQVAVKRLREKITKGHREFESEVSVLGKIRHPNVLALRAYYLGPKGEKLLVFDYMSKGSLASFLHGGGTETFIDWPTRMKIAQDLARGLFCLHSQENIIHGNLTSSNVLLDENTNAKIADFGLSRLMSTAANSNVIATAGALGYRAPELSKLKKANTKTDIYSLGVILLELLTRKSPGVSMNGLDLPQWVASVVKEEWTNEVFDADLMRDASTVGDELLNTLKLALHCVDPSPSARPEVHQVLQQLEEIRPERSVTASPGDDIV

SEQ ID NO: 1472 - protein, 920 aa, Glycine max
MSLPKTLLSLFLLLTIPLVTADDAAVMSNFLKSLTPPPSGWSETTPFCQWKGIQCDSSSHVTSISLASHSLTGTLPSDLNSLSQLRTLSLQDNSLTGTLPSLSNLSFLQTVYLNRNNFSSVSPTAFASLTSLQTLSLGSNPALQPWSFPTDLTSSSNLIDLDLATVSLTGPLPDIFDKFPSLQHLRLSYNNLTGNLPSSFSAANNLETLWLNNQAAGLSGTLLVLSNMSALNQSWLNKNQFTGSIPDLSQCTALSDLQLRDNQLTGVVPASLTSLPSLKKVSLDNNELQGPVPVFGKGVNVTLDGINSFCLDTPGNCDPRVMVLLQIAEAFGYPIRLAESWKGNDPCDGWNYVVCAAGKIITVNFEKQGLQGTISPAFANLTDLRTLFLNGNNLIGSIPDSLITLPQLQTLDVSDNNLSGLVPKFPPKVKLVTAGNALLGKPLSPGGGPSGTTPSGSSTGGSGGESSKGNSSVSPGWIAGIVVIVLFFIAVVLFVSWKCFVNKLQGKFSRVKGHENGKGGFKLDAVHVSNGYGGVPVELQSQSSGDRSDLHALDGPTFSIQVLRQVTNNFSEENILGRGGFGVVYKGVLHDGTKIAVKRMESVAMGNKGQKEFEAEIALLSKVRHRHLVALLGYCINGNERLLVYEYMPQGTLTQHLFEWQEHGYAPLTWKQRVVIALDVARGVEYLHSLAQQSFIHRDLKPSNILLGDDMRAKVADFGLVKNAPDGKYSVETRLAGTFGYLAPEYAATGRVTTKVDVYAFGVVLMELITGRKALDDTVPDERSHLVTWFRRVLINKENIPKAIDQILNPDEETMGSIYTVAELAGHCTAREPYQRPDMGHAVNVLVPLVEQWKPTSHDEEEEDGSGGDLHMSLPQALRRWQANEGTSSIFNDISISQTQSSISSKPAGFADSFDSMDCR

SEQ ID NO: 1473 - protein, 134 aa, Zea mays
MRKHRIVSLVAALLILLALAVSSNRNAQEDSMADNTGTLVGGIQDVPENENDLHLQELARFAVDEHNKKANALLGFEKLVKAKTQVVAGTMYYLTIEVKDGEVKKLYEAKVWEKPWEKFKELQEFKPVEEGASA

SEQ ID NO: 1474 - protein, 205 aa, Colocasia esculenta
MALMGGIVDVEGAQNSAEVEELARFAVDEHNKKENALLQFSRLVKAKQQVVSGIMHHLTVEVIEGGKKKVYEAKVWVQAWLNSKKLHEFSPIGDSSSVTPADLGVKRDAHEAEWLEIPTHDPVVQDAANHAVKSIQQRSNTLFPYELLEILHAKAKVLEDLAKIHLLLKLKRGSREEKFKVEVHKNIEGTFHLNQMEQDHSDSGN

SEQ ID NO: 1475 - protein, 475 aa, Bacillus thuringiensis
MIIDSKTTLPRHSLIHTIKLNSNKKYGPGDMTNGNQFIISKQEWATIGAYIQTGLGLPVNEQQLRTHVNLSQDISIPSDFSQLYDVYCSDKTSAEWWNKNLYPLIIKSANDIASYGFKVAGDPSIKKDGYFKKLQDELDNIVDNNSDDDAIAKAIKDFKARCGILIKEAKQYEEAAKNIVTSLDQFLHGDQKKLEGVINIQKRLKEVQTALNQAHGESSPAHKELLEKVKNLKTTLERTIKAEQDLEKKVEYSFLLGPLLGFVVYEILENTAVQHIKNQIDEIKKQLDSAQHDLDRDVKIIGMLNSINTDIDNLYSQGQEAIKVFQKLQGIWATIGAQIENLRTTSLQEVQDSDDADEIQIELEDASDAWLVVAQEARDFTLNAYSTNSRQNLPINVISDSCNCSTTNMTSNQYSNPTTNMTSNQYMISHEYTSLPNNFMLSRNSNLEYKCPESNFMIYWYNNSDWYNNSDWYNN

SEQ ID NO: 1476 - DNA, 1000 bp, Pseudomonas syringae
  source 1..1000: mol_type = other DNA
atgaacaagcgctacggcaacaacttgccgggatcctgttgcgcgctgagcaaccggatcgactggacgtcaccttcgcgcagcacgccatctggcaaaaaggccgccgttaatcgtttccaatatttctgcaggagtctgcccgtgaccaccttcaccgtgcccctgattctgtcggatgcaagccccacggcactcgccgctaccgcgcaacgtctgcgcgccgagcacgagacgcgctccttcgccgctgatgactgacatcaccgtgcccttccagctcggaatgcacttcgtcttcccagctttcctgatacggctgacgatacattttgcggaagtgattgcggatcaggttcagcgcgatgccacacagccaggtctgcggtttgctggcatgttgaaacttgtgctcgttacgcagggcttcaagaaacacgcactggagaatgtcatccacatcatcagggttcatcacccgcttttggataaacgccctgcagggcgtttatccaaaagcgggtgatgaaccctgatgatgtggatgacattctccagtgcgtgtttcttgaagccctgcgtaacgagcacaagtttcaacatgccagcaaaccgcagacctggctgtgtggcatcgcgctgaacctgatccgcaatcacttccgcaaaatgtatcgtcagccgtatcaggaaagctgggaagacgaagtgcattccgagctggaagggcacggtgatgtcagtcatcagcggcgaaggagcgcgtctcgtgctcggcgcgcagacgttgcgcggtagcggcgagtgccgtggggcttgcatccgacagaatcaggggcacggtgaaggtggtcacgggcagactcctgcagaaatattggaaacgattaacggcggcctttttgccagatggcgtgctgcgcgaaggtgacgtccagtcgatccggttgctcagcgcgcaacaggatcccggcaagttgttgccgtagcgcttgttcat

SEQ ID NO: 1477 - DNA, 1313 bp, Arabidopsis thaliana
  source 1..1313: mol_type = other DNA
atggcctctctattctcttcagttctcttgtctctttgtttactctcttcactttttctctcaaatgcaaacgctaagccaaaactaggcttcaccgcggatctaatccaccgtgattctcctaaatcgccgttctataacccgatggaaacctcttcccagcgtctacgaaacgcgatccaccgatccgttaaccgtgttttccatttcactgaaaaggataacacaccacaaccacagattgacctcacctcaaatagcggtgaatatctcatgaacgtatccattggaacacctcctttcccgatcatggccatcgccgacaccggaagtgatctcctctggacgcagtgcgcaccatgcgatgattgttacactcaagttgatcctctctttgaccctaaaacgtcttccacatacaaagacgtttcttgctcctcaagtcaatgtactgccctagaaaatcaagcctcttgttccacaaatgacaacacttgttcttactcattgtcttacggggataactcatacacaaagggtaacatcgccgtggataccttaacgctcggctccagcgatacccgccctatgcagcttaagaatattattatcggttgtggtcacaacaacgctggaacgtttaacaagaaaggctctggaatcgtcggactaggtggtggtccggtttcgcttatcaagcaacttggcgactccatcgacggtaaattctcatactgcttggttcctctaacttccaaaaaggatcaaacgagtaaaatcaacttcggaaccaatgccatcgtgtcgggatcaggagttgtctcaactcctctgatcgcaaaggcgtctcaagagaccttctattacctaaccctaaaatccattagcgtgggaagcaagcaaatccaatactcaggctcagattctgaaagcagcgagggaaacatcatcatcgattcaggcacaactttaacgttattaccgactgaattttactccgagctcgaggatgcggttgcatcctctatcgatgctgagaagaagcaagatccacaaagcggtttgagtctatgttacagtgcaaccggagatctaaaagttccagtcattactatgcattttgatggagccgatgtgaagcttgactcctccaatgcctttgtacaagtctcggaggatttggtttgctttgccttccgcggaagcccgagtttctccatatacggtaatgtggcgcagatgaactttcttgttggatacgacactgtttccaaaacggtgtcatttagccaacagattgtgcaaagatgtag

SEQ ID NO: 1478 - DNA, 1771 bp, Poncirus trifoliata
  source 1..1771: mol_type = other DNA
ttgagaggaatatatattgtagctgttggcgactaatagatgattgttaattattaatgaatcagatattgtgttttgtgttagatttagtgattgatgatcttttcagtgacacagcgacacaaataacatcaaatatgttaatttatagttttataccatatcgattcaaaaccaaatacagtaaaacgaactaatcgttcgtaggatgatacaatcttgcgaaatacaaaatttaattactgcttggtgcagtcagtcggtctaaatgacactgtttgttgttctatgtcatagccgactaaaaagttagtctgcattatattaccataaagttgcagactattggtggtacctttaaaaacagaacatacaatatccttcgaaaccttcacaaaaaagttggaacgactcaatttcacatctgcacctctgaaatgtattgtaacttcaggaacttgagatagtgaattaaaactgtagcaaagttcaaatgatcctttggggtctgcaacaggttgtgcctcaatcatactggacattactgacaacaattttgagttataaccttgtggcaataaggtaaatgttgtaccagaatcgattacaatgtctcttcctggagtcgatccagacataacttctagtctttggtttcctacactgattgcatcaattgtgagaacataagaggttttggctttagtcaagggagtagaaaccactcctgggcctgaaacaattccattggttccaaaattgattttggttgaggttgctggaaccaaacaataggagaatttaccagcaattgtagttcgcatttgagaaataagtgaaatatcgccgcctccaaggccaacaattccggttgtttttgaattaaacaagccaccattgtttgttccgcaaccaaaggttattccaggcagagccacggcctgtcctgttgttgaacccaaagtaacagtttcggtagcaagattgccatttgagaaggatccatctccataagagaccgagtattgacaatttaccccagagcaagatttttggctaagagatgcacattggcttgaggagcatggaagagatttgtaagtagatgactttttaggatcaaaaagtggagagtcctgcatgtaacattttgatggtgggcaaggctcgcactgcgtccatatgaggtcacttcctgtatcagcaacagctagtatttcagtagcgggagtaccaattgatatacgtatgagatattctcccctattgggtattatatcagcttgggaagcggctgatgaagatattgatgagttctgattaaagtgattaagacgattgagagaacgagtcaaagcatttctcaatcgttggtagggagtttcactggagttgtaaaagggagacttgggagagtcacggtggattagctcaacactgaaacctccagtttgagcttctattggagagacaacataaaaacaaagaaagaagagaatgaatgcacaactcaagaaggttgccataatcaaagctgtgattgaggtaataagaaagtggcaacgagtctatgcttatatagaggaggacacagagagataagttgcaaaatttaattaattttgaatagaagaccaaaaaaaaaaaaaaaaggaaagaaaatgagcttccaagaaaatgaaactttcttgtgtagtaagcttttgttatagtgacaattatcttatgggagggcctaagttacgttyaacgtaayttaygccctctcaca

SEQ ID NO: 1479 - DNA, 1426 bp, Poncirus trifoliata
  source 1..1426: mol_type = other DNA
atggcaaccttcttgagttgtgcattcattctcttctttttttttttttatgttgtctctccaatagaagctcaaactggaggtttcagtgttgagctaatccaccgtgactctcccaagtctcccttttacaactccagtgaaactccctaccaacgattgagaaatgcttttactcgttctaccaatcgtcccaatcactttaatcagaactcatcaatatcttcatcaaaagcttcccaagctgatataatacccaatatgggagactatctcatacgtatatcaattggtactcccgcgactgaaatactagcagttgctgatacaggaagtgacctcatatggacgcagtgcgagccttgcccaccatcacaatgttacatgcaggactctccacttttttatcctaaaaagtcatctacttacaaatctcttccatgctcctcaagccaatgtgcatctcttagccaaaaatcttgctctggggtaaattgtcaatactcggtctcttatggagatggatccttctcaaatggcaatcttgctaccgaaactgttactttgggttcaacaacaggacaggccgtggctctgcctggaataacctttggttgcggaacaaacaatggtggcttgtttaattcaaaaacaaccggaattgttggccttggaggcggcggtatttcacttatttctcaaatgcgaactacaattgctggtaaattctcctattgtttggttcaggcaagctcaaccaaaatcaattttggaaccaatggaattgtttcaggtccaggagtggtttctactcccttgattgttaaatccaaaaccttttatgctctcacaattgatgcaatcagtgtaggaaaccaaagactagaagttatgtctggatcgactccaggaggagacattgtaatcgattctggtacaacacttaccttattgccacaacgttataactcaaaattgttgtcagtaatgtccagtatgattgaggcacaacctgttgcagaccctaaaggatcacttgaactttgctacagttttaattcactatctcaagttcctgaagttacaatacatttcagaggtgcagatgtgaaattgagtccttccaacttttttgtgaaggtttcgaaggatattgtatgttctgtttttaaaggtaccaatmgtctgccactttatggtaatataatgcagactaactttttggtcggctatgacatagaacaaggaacagtgtcatttaaaccgactgattgcaccaagcaataattaattgggaagcttaatcgatattctccactctactagagtttgatcgagtgattttcaaaccactttctttagcagatcaaccgatttcaaattctaatgcgattggagctgaataaaatctatttaaataaatgta

SEQ ID NO: 1480 - DNA, 192 bp, Hyalophora cecropia
  source 1..192: mol_type = other DNA
atgaatttcgcaaagatcctatccttcgtcttcgctctggtgctggctttgagcatgaccagcgctgctcccgagcccaggtggaagatcttcaagaaaattgaaaaaatgggcaggaacatccgtgatggcatcgtcaaagcgggcccggcgatcgaggtcctcggttcggctaaagctataggaaaatga

SEQ ID NO: 1481 - DNA, 33 bp, synthetic construct
  source 1..33: mol_type = other DNA
aaaaaactgtttaaaaaaattctgaaatatctg

SEQ ID NO: 1482 - DNA, 45 bp, synthetic construct
  source 1..45: mol_type = other DNA
aaatggaaactgtttaaaaaaattggcgcggtgctgaaagtgctg

SEQ ID NO: 1483 - DNA, 219 bp, Medicago truncatula
  source 1..219: mol_type = other DNA
atggagaagaaatcactagcaggcttatgcttcctcttcctcgttctctttgttgcacaagaaattgtggtgactgaagctaagacttgtgagaatttggctgataaatacaggggaccatgctttagtggttgtgatactcactgcactaccaaagagaatgcagttagcggcaggtgcagggatgactttcgttgttggtgtactaaaagatgttaa

SEQ ID NO: 1484 - DNA, 495 bp, Raphanus sativus
  source 1..495: mol_type = other DNA
atggagaagaaatcactagctggcttgtgcttcctcttcctcgttctctttgttgcacaagaaattgtggtgactgaagccaaaacttgtgagaatttggctgataaatacaggggaccatgcttcagtggctgtgacactcattgcacaaccaaagaacacgcagttagcggcaggtgcagggatgactttcgctgctggtgtactaaaagatgtagcaacgcagcagacgaggtggcgacgccacaagacatggctaagtttgcttctatcattgtccttctcttcgttgctcttgtcgtttttgctgctttcgaagaaccaacaatggtggaagcacagaagttgtgtcagaggccaagtgggacatggtcaggagtctgtggaaataataacgcatgcaagaatcagtgcattcgacttgagaaagcacgacatgggtcttgcaactatgtcttcccagctcacaagtgtatctgttatttcccttgttaa

SEQ ID NO: 1485 - DNA, 243 bp, Arabidopsis thaliana
  source 1..243: mol_type = other DNA
atggctaagtctgctaccatcgttactcttttcttcgctgctcttgttttctttgctgctcttgaagcaccgatggtggtggaagcacagaagttgtgcgagaggccaagtgggacatggtccggagtttgcggaaacagtaacgcgtgcaagaatcagtgcattaaccttgagaaagcacgacatggatcttgcaactatgtcttcccagctcacaaatgtatctgctacttcccatgttaa

SEQ ID NO: 1486 - DNA, 24 bp, Brassica oleracea
  source 1..24: mol_type = other DNA
ttttggcagaaaatgagctttgcg

SEQ ID NO: 1487 - DNA, 21 bp, Photorhabdus sp.
  source 1..21: mol_type = other DNA
tggaactggagcaaaagcttt

SEQ ID NO: 1488 - DNA, 30 bp, Urechis unicinctus
  source 1..30: mol_type = other DNA
gcggcgggcatgggcttttttggcgcgcgc

SEQ ID NO: 1489 - protein, 437 aa, Arabidopsis thaliana
MASLFSSVLLSLCLLSSLFLSNANAKPKLGFTADLIHRDSPKSPFYNPMETSSQRLRNAIHRSVNRVFHFTEKDNTPQPQIDLTSNSGEYLMNVSIGTPPFPIMAIADTGSDLLWTQCAPCDDCYTQVDPLFDPKTSSTYKDVSCSSSQCTALENQASCSTNDNTCSYSLSYGDNSYTKGNIAVDTLTLGSSDTRPMQLKNIIIGCGHNNAGTFNKKGSGIVGLGGGPVSLIKQLGDSIDGKFSYCLVPLTSKKDQTSKINFGTNAIVSGSGVVSTPLIAKASQETFYYLTLKSISVGSKQIQYSGSDSESSEGNIIIDSGTTLTLLPTEFYSELEDAVASSIDAEKKQDPQSGLSLCYSATGDLKVPVITMHFDGADVKLDSSNAFVQVSEDLVCFAFRGSPSFSIYGNVAQMNFLVGYDTVSKTVSFKPTDCAKM

SEQ ID NO: 1490 - protein, 63 aa, Hyalophora cecropia
MNFAKILSFVFALVLALSMTSAAPEPRWKIFKKIEKMGRNIRDGIVKAGPAIEVLGSAKAIGK

SEQ ID NO: 1491 - protein, 11 aa, synthetic construct
KKLFKKILKYL

SEQ ID NO: 1492 - protein, 15 aa, synthetic construct
KWKLFKKIGAVLKVL

SEQ ID NO: 1493 - protein, 72 aa, Medicago truncatula
MEKKSLAGLCFLFLVLFVAQEIVVTEAKTCENLADKYRGPCFSGCDTHCTTKENAVSGRCRDDFRCWCTKRC

SEQ ID NO: 1494 - protein, 164 aa, Raphanus sativus
MEKKSLAGLCFLFLVLFVAQEIVVTEAKTCENLADKYRGPCFSGCDTHCTTKEHAVSGRCRDDFRCWCTKRCSNAADEVATPQDMAKFASIIVLLFVALVVFAAFEEPTMVEAQKLCQRPSGTWSGVCGNNNACKNQCIRLEKARHGSCNYVFPAHKCICYFPC

SEQ ID NO: 1495 - protein, 80 aa, Arabidopsis thaliana
MAKSATIVTLFFAALVFFAALEAPMVVEAQKLCERPSGTWSGVCGNSNACKNQCINLEKARHGSCNYVFPAHKCICYFPC

SEQ ID NO: 1496 - protein, 8 aa, Brassica oleracea
FWQKMSFA

SEQ ID NO: 1497 - protein, 7 aa, Photorhabdus sp.
WNWSKSF

SEQ ID NO: 1498 - protein, 10 aa, Urechis unicinctus
AAGMGFFGAR

SEQ ID NO: 1499 - DNA, 6393 bp, Tomato brown rugose fruit virus
  source 1..6393: mol_type = other DNA
gtatttttgttttacaacatataccaacaacaacaaacaacaaacaacaacattacaattactatttacaactacaatggcatacacacagacagctaccacatccgctttgctcgacactgtccgaggtaacaataccttggtcaacgatcttgcgaagcggcgtctttatgacacagcggtcgacgagttcaacgctcgtgatcgcaggcccaaagtaaatttttccaaagtaataagtgaggaacagacgcttattgctactagggcatatccagaattccagataaccttctataatacgcagaacgccgtgcattcgcttgccggtggactacgatccttagaactggaatatctaatgatgcagatcccgtacggatcactcacatatgatataggtgggaattttgcatctcatctgttcaaaggacgggcatatgttcactgctgtatgcccaatcttgatgtccgcgacataatgcggcacgaaggccagaaagacagtatagaattatacctttccaggcttgagcggggcaacaaagttgtcccaaatttccaaaaggaagcttttgacagatacgctgaaacgccagacgaagttgtctgtcacagtaccttccaaacgtgtacgcaccagcaggtggaaaacacaggcagggtgtatgctattgcattgcacagtatatacgatatacctgctgatgaattcggagcggcacttttaaggaaaaatgtccatgtttgttacgccgccttccacttttccgagaatttacttctcgaagattcacacgtcaaccttgacgaaatcaacgcgtgtttttcgcgtgatggagacaagctgactttttctttcgcatctgagagcactttaaattattgtcatagttattctaatattttaaaatacgtgtgcaaaacttacttcccggcatctaatagagaggtctacatgaaggagtttttggtcaccagggttaacacctggttttgtaagttttctaggatagatacttttttattatacaagggggtagcccacaaaggtgtaaatagtgagcaattttacagcgcaatggaagatgcatggcactacaaaaagactcttgcaatgtgtaacagcgagaggattcttcttgaagattcctcatcggtcaattactggttcccaaaaatgagagatatggtcatagttcctctattcgacatatctctcgacaccagtaaaaggacccgcaaagaagtcttagtgtcaaaggattttgtattcacagttttaaatcacattcgcacttatcaagccaaggcacttacatactccaatgttttatcctttgtcgaatcaattcgttcaagggtaattatcaacggagtgactgccaggtctgagtgggatgttgacaaatctcttttgcaatccttgtccatgacatttttcttgcatactaagcttgccgttttaaaagacgaattgttaatcagcaagtttagtttggggccaaaatcagtaagccagcatgtatgggatgagatttccctggcttttggaaacgcatttccatcgatcaaggagagactgctaaatcggaaactaattaaagtgtcgggagacgcattagaaatcagggtgcctgatttatatgtgacttttcacgatagattagtgactgagtacaaaacatcggtggatatgccagtgcttgatatcagaaagagaatggaggagactgaggttatgtacaatgcattgtctgagctatctgtgctcaaggagtcggacaagttcgacgttgatgttttttcccggatgtgccagactttggaggtagacccaatgactgcagcaaaggttattgtggcagtgatgagcaacgagagcggactgactcttacattcgaacagccaactgaagcaaatgtcgcattggcacttaaagattcagaaaaagcctctgagggtgcactagtggttacttctagagatgttgaagaaccatccatgaagggttcaatggcaagaggagagttacaattggccggtctgtctggagaccaaccagagtcttcctatactcggaacgaggaaatagagtcattagagcaattccacatggcaacggctagttcgttaattcggaaacagatgagttcgattgtgtacacgggccccattaaagttcagcaaatgaaaaactttattgatagcctggtagcatcactctctgctgcggtgtcgaacctagtcaagatcctaaaggatacagctgctatagatctcgaaacccgtcagaagtttggagtcttagatgttgcgaccaaaagatggttaattaaacctttagccaagaatcacgcatggggcgttattgaaacacatgctaggaagtaccacgttgcacttttggagtatgatgagcatggagtggtaacttgcgacagttggagaagggtggccgtgagttctgagtcaatggtttattctgatatggcaaagctcagaacactgaggagattattaagagatggtgagcctcatgtcagcagtgctaaagtcgtcctagttgacggtgtcccgggttgtggaaagacaaaagagattctctcgaaagtaaattttgaggaagatctaatcttagtaccgggtaagcaggctgctgaaatgataaagaggcgtgctaatgcgtcaggaataattcaagccacaagagataatgttcgtactgttgattcatttataatgaattacggtaaaggaacacgctgtcagttcaaaaggttatttatcgacgaaggtctgatgttgcacactggttgtgtgaattttcttgtttctatgtctctgtgcgaaattgcatatgtttatggagacacacaacaaattccatacatcaacagagtatccggttttccgtaccctgcacattttgcaaaaatagaggttgatgaggtggaaactcgcagaactacgctgcgttgtccagccgacattacccactatcttaacagaaggtacgaaggatatgtcatgtgtacatcgtcggttaaaaagtcagtttctcaggaaatggtgagcggggccgcaatgatcaatcctgtatctaagccattgaatgggaaagttttgactttcactcagtctgataaagaggcgctgctttctcgaggatatacggacgtccatacagtacatgaggtacaaggtgagacatatgcagatgtgtcgttggtcagattgactccgacacctgtatctatcatcgcaggagatagtccgcacgttctcgtagctttgtcaaggcatacccaaacattgaagtattacaccgtagtgatggatcctcttgtaagtataattagggatttagaaaaacttagttcttacttgttagatatgtataaagtagatgcagggacccaatagcaattacaggtagactccgtgtttaaaggttctaatctttttgttgcagcaccaaagactggagatatctcagatatgcaattttactatgataagtgtctcccaggtaatagcaccatgttaaataactatgatgctgttaccatgaggttgactgacatttctcttaatgtcaaagattgcatattggatttctctaagtctgtggctgcaccgaaggatccgatcaaaccactgattccgatggtacgaacggcggcagaaatgccacgccagactggactattggaaaatttggtggcgatgatcaaaagaaactttaattcaccggagttatcaggaataatcgacattgagaatactgcatctttagtagtagataaattttttgatagttacttgcttaaagaaaaaagaaaaccaaataaaaatgtttctttattttgtagagagtctctcaatagatggttagagaagcaggagcaagtgaccattggtcagcttgcagattttgattttgtggatcttcctgccgttgatcagtacaggcatatgattaaagcgcaacctaagcagaagctggatacatcaattcaaagcgaatatccggccttgcagacgattgtgtatcattcgaaaaagatcaacgcaatcttcggtcctttgttcagtgagctcacaaggcaaatgctcgaaagcatagactcaagtaagtttttgttctttacaaggaagacgccagctcaaattgaggatttcttcggagatctcgatagccatgtccctatggatatcttggagttggatatttcgaagtatgacaaatctcagaacgagttccactgtgcagtagagtatgaaatatggagaagacttggattagaagattttctgggagaagtttggaaacaaggccacaggaaaactactcttaaagattacacagctggtattaaaacgtgtttatggtaccagagaaagagtggggacgttacaacattcatcggtaatacggtgattattgctgcttgtttagcttccatgttgcccatggagaaaataatcaaaggtgcattttgcggagatgacagtttactatacttcccaaaaggttgtgagtttcctgacatacagcatacagccaaccttatgtggaatttcgaggctaagctattcagaaagcagtatggttatttctgtggaaggtacgtgatacatcatgacagagggtgtattgtttattatgaccctttgaagttgatttctaaacttggtgctaaacacatcaaggattgggatcacttagaagagttcagaagatccctttgtgatgttgcaaattcgttgaacaactgtgcgtattacacgcagttggacgacgctgtgagtgaggtccataaaaccgcacccccgggttcgtttgtatataaaagtttagttaaatatctgtccgataaggttctttttagaagtttgtttatagatggctcttgttaagggtaaagtcaatattaatgagttcatagacttgtcaaaatcagaaaaatttcttccgtctatgttcacacctgttaagagtgtcatgatctccaaggttgataagatattggttcatgaagatgaatctttgtccgaagtcaatttactcaaaggtgtaaaactcattgatggtggctatgtacatcttgctggtcttgtggtgacaggtgaatggaatttgccagataattgtcgtggtggtgtcagtgtctgtttggtcgataagagaatggagagagcggacgaggcaactcttgcttcatactataccgcagcggctaagaaaaggtttcagttcaaagtcgttccaaattacaacatcactaccaaggacgcagaaaaggcagtttggcaagtactagttaatattagaaatgttaaaattgctgcgggttactgtccgctgtcattagaatttgtgtcagtgtgtattgtttataaaaatattataaaactcggtttgagagagaaaattacgagcgtcacggatggagggcccatggaactatcagaagaagttgttgatgagttcatggaagaagtcccgatgtctgtaaggcttgcaaaatttcgttcgaagaccggaaaaaagtttagtagtaaaagtgagaataatagtggtaataataggccgaaaccagacaaaaaccaaaggaaggaaaagggtttaaaagttagggttgagaaggataatttaattgataatgaattggagacttacgtcgccgattcagattcgtattaaatatgtcttacacaatcgcaactccatcgcaatttgtgtttttgtcatcagcatgggccgaccctatagaattaataaatttatgtactaattcactaggtaatcagttccaaacacaacaagctagaacaaccgttcaacggcaatttagcgaagtgtggaaacctgtccctcaagtcactgttaggtttcctgacagtggttttaaggtgtataggtacaatgcggtactagatcctctagttactgctttgttaggagctttcgatactagaaataggattatagaagtcgaaaatcaggcgaacccgacaaccgccgaaacgttagacgctactcgtagagtagatgacgcaacggtggctataaggagcgctataaataatttagtagtagaattggtcaaaggaacaggtttgtacaatcagagcacatttgaaagtgcatccggtttacaatggtcctctgcacctgcatcttgagataatcgagatgcttaaataacagattgtgtctgcaaacacacgtggtacgtacgataacgtatagtgtttttccctccacttaaatcgaagggtagtgtcttggagcgcgcgggacaaatgtgtatggttcatacacatccgtaggcacgtaataaagcgagggattcgaattcccccggaacccccggaggggccca

SEQ ID NO: 1500 - DNA, 11519 bp, Celery latent virus
  source 1..11519: mol_type = other DNA
aaaatttaaatttatgagcaagagaatatatacgattattgttgttttgtgctttcaggtttgctttcaaaatctccgaacacagcctacacaatcttcacataccttctcaacaaatccggcgatccccggtaccgacgctcttcaatttgaagaaaacgcaaacttaacttactctaccataaaatacaatattttaaagtttaatttaaattacaaacaatcaatcatgtctgtggtctctttcgggtcaatcacgagcatggacttcgatgctgcatgtctagcagctatgatcgaaacccctggtggctctattccaccaactccacaatcaccacccacttcaccagtggcggtgaaacaaaggaaaattttaaattttccaattgccaaaatcaggacaactcctgatgcatcttttgagatgtgtgtgaagttccccgagagcttcattgattccttctgtgctcaagcacagaaagaattaaaatattggcacgctgctattacgcagttgaaattctttggtggtgagacaccaaagactcttgaaaccttggtgaaccaaggtcaagctcacactcaccaagttattttaaacttggttaaaatccttgatagtgctccaaaagcaattcaaggaaagaaggagttggaaaatttcttccagctgagcccacatggaaacaattccaaagaaccaattgacgttagtcgaaaggtttatatggaaccgtgcaaaataagtccacgcaagcgacaagtgtgctcctgtgacaatgacgatgatgcacattatcattgttactattgtgatattgtgtgttcaagcaaaaatctattgcaagaacacgaaagggatttttgcgaggatgcacagtcagtgcaagcatttgggtataaacttgagagtccaaatgtctttgacccaccccatgtgacgcagcaaaggagtgttgcaccatctttgggaaaaactttggaatctcctgtgaaatctccagagcagtcaaagccaaacctggagaaaagtttcccactagtggaatcttccaccaacagtggcatgatcttctttggatcaatagctaccatggttccgtctcatattgaaaaatatgtgaggaattgtgaaactgagaatccgattgatgcagctgcatcaaatttggcgatgcaagaagctaaaagctctggcgctccttgtatagtagtgcatcataaggcactaccaggtggaaagaaagattttctttttcctcataactctcctcaagttgtgagaactgaaaccgaagagccaattgctggtaccattgatagaccaacaataaaacgtgctttatttacccgcattaagaagaaagcacaagaaatttgtgtgaacccagggggaaccatccagagaaaaacaaagcgatggttgcggccagcggaagttgcacaaattgtgcgagctacctctgatccacaacatccattgttcaaggtggacgttactcaaattattgaagttgttcatcctgtttataggactgaaagaactgaagttgtgcagcaatgcataacaaggggaacgtacaaattgatgtctaaagcccaacaacggaaggcacgagcaatgcgctcagctggaatgttagtgatcactgataacccaacaacgcattgggtatctgaacctcagaaaatgctagtggtaaaggaaaaactgagcacaacaaagcatgtgaaactccggaatgttgaagtgaatgctgaatctgaaatgttttggggaactaaaacaaaggagggaccctcgaaaacagccttaaagcgctgtaagcgtaacatcgatcgcttggctcttcttgatccgcaaatgggtgagtctgcgaatggtgaatgttggatgaacacctttaagcaccatttaaaagtggggagcattgatattcttccaaataaggttcgtttaccaaaccttaggtcggcattctcacgatggatacctttggttgattatgttgaaattttgaaatttcattgtaagtcacaaccaaagcttaaaagggttgtgatacctactccagttacttatctggaaggttctagatatcacattcatgttggttatagcaagaactgctcatggattacggtcgaacaactaattaggcaattgcagactctgttaacatcatccaaatatggagaacattttaagagagcaattgttggtggtgaaccggaagacaaattcacaccagtggttcctatagttgacgtggaaactgagagagctaaatctagcttggcaaaatggacaactgcgcaacagagatatatgggatctattagaacccgaatcaactcacaagcagaaaaacataaaatcgattcggaaaaaaagatctggataccaatgaggcacgacacgatggatatgttaactccaccatatcttttcgaaaatgggctgagaaacaacgaagttcaacaagtcggccaggttcttggagattctgtagatcgtgctggaaacagttcaggtcagagttctcaatgccaacaacaaaatgtggcgcttgcatccgaaggaaacaacgacaacgtgataaacgagagcgtgcgcagcattcaaaacttagttactgccaatatgcagttgcaagagcaatgcaaattgttgctcgcctcacacgaacaagctatcatggactccgtagaacacggaaacttggagattcagaagcacgatgtagaggtctcgcagaaaccatcaacgaggaaaagcgactcacagaggaatttgcaaaaattctcattgaagaaaatagtcgcctcagaagagatgtcgagaacattgggcagaggatggagaaaatctgtcacctcaatcggtgttccaattgtgagtgcttccattgcagaagctttaaatcaagtcgttcaaaggggaaatacttcctggcttgatgtaggcatttctggaacattgttgaagcaatgtactctttttgctacgagaacttttcaagcgtattgtagctacaaattagcacgaaacgtgctgacattaaccgtgggagaattgtatgataatgtgaaatcatacatcaactctataatgggttccacagatcctgaagtgactggtttcttgtcgcaagtacgtagcgcaccttcaatggtgaagatggccattttgctcacaatgtttgctatctcggtgaaattaatgagaaaattcttcaaggtgaagaataatggaactagctttactgtaagcggagagaatgtctctgcaagccagttgcgaatctcagcacaggctcaagctcgatcaactgacaacatgaccccaactgtaaagaagctttgtagcattcttggaatgattggtttggtttgttgttgttacgatagaacaacatgggcatatcaaaaggattggatggatgcttggatcacaagtatcacatatgccggtgcatctgatagtatttgggaatcaatttcccatccatttgaaacattgcataacattgcagtgagtggaggagatcgttcaccagaaactacagctcgtttggagcgaattttggctggtgcagggttgaacgcacaagcccaagcacttgatgaatttggagcgtctagctcagtgatgggtcagacactgcaaaacatattggatgaggttgaaagtacaaatgtgtcaatcgttagtgaaatgaaagcattgccacactaccaccgaaatgccactaccttcaatcaagcggctcgtgatttagtgactgaaccagatgcaacatatcaaatgttgttaacagcagcaactggtactggaaaatcaacgcttttcccagtgcacctaaggtcacaatctcaaaagagagtcttgctgctcattcctctcgttgcagcaacacatggagtttaccagcgacttaaaagtcaaagggtgaatgatattggttaccatgctgattcaatatctgaaaacccaaatgctaaattaatcatctcaacatatggacacatgtgtgtgaaattacttggtggtcaaaacccttttgatcaatttgattatattttagctgatgaatgtcatgttgtaacactcgagactgttacagtgatatcccatttactccaacagcgagaaatggcgacgtggaaaacagttttcatgacagcaacaccattcaacaatatcacacttaatagtgttgagacagaacagcctgtaatcatgcaacagaccgagcatttccacaaccccaaaagctttgtagattttctaaaagctggcggcactgaaagagtgcaaacatatgctaagggaggctgcatcgtattctgttctacccaaaaagaaactgaggaatcagcgaaagctcttaaagcgagtggggttattgcactcttttaccatgcctctaaccgattggaatgggattcctttgcaaagaaaaatgagcgaagcatgggacaattaaatttttatctctttgctacaaatgcactagaatctggtgtgacgatccctatgaaaagttgcgttgattttgtaactaaaatgcatccagtagttggtggagataggaagactattactatggctccaacttcaattagcattcaagagcaattgcagcgtcgaggtcgagttggacgaacttgtccaggtgggtatctatacacatcagttggaaccccgttgatgtataaacttgacccagattcatccattaagtacttgttgtactgttggaagagtggtatcaaatgttataaggaagcattaaatattcctgatgaatgcacgataacattcactaaagagaaaattggtgctatttggacacatgacacaccgccagttgttacagcagccttagtggataattttggtgcagtttacaggaatgcaaacttcttcttagcatcacatcgaagaaattatgtggaaattccacatacaactgatatgattctgccctcaactctctcgacatgggagaattttgaattggatgggaatgaagtatcagatggcacacgaatgagagtaccacaaaatcatttctttttccgaaacgaaagggtccaagagagttggttgaaattgcaagctgcaattcttactgaactaactgaagcagaagccactaagaagcgagatatagttatcgagaatctgatggcgcgtcgagtatcgggccatcctgcttcgaagcttgaaatagctagaatgataatggccaaacaacaagtggtacaacaagcaagagacacgaaacgtgttcgagaaacccttagtgagagtatatctgattactccggcatcttctcaaacttttctggaatattttcagttcaagaaagattgaaaaaggcttctatcaaggctaatgaggaattagatatggttattcaggaaaatgaatcccatattttatttctacaagacatgataaaagaaactcctgagatcatccctgatatggctttagaggagcagatccaacatatggaatatgcaaaagccatattggaaaatggttggatcagtgggaatcctcaagcaaagcttctcattatgcgcacaacgcataaaaattttcatgatcttgttacaaaaaccaaggatgggacctatcgcatgaaatcatatgtgcaacgcatgttcgattttgtgaagaaacatccattgttaatttttatgtccattatgatgggaacgtcattagcagcaggatacttcatgatgagtaaagactctgaagatgacgatgcaatagtgcaggacaaggttttcaaacgcaatgataaggcaatgctggaatggtgcttgagaggcaaagcatgtaaatgtgacgccacacacttcgaggcacagtatgtacttgattcacgtcattatagaactattctcgaagattgggtaaagttcccattgcgagggttccacaatatacaaatagtaaactatggcacagtgagcaaatatgcacgtgctctagctttcctatcagtttgtgcactcttagctaacccgactatggtgtataatagcgcagcacattccatggctggaaatagtgagtataatgagtcagtagcaaaatccctaatgcacaatattctaagagattggaatagagtcccgctcatagacttattggtaaaagggatagatggaagtgatgatcgttatgatcagtacatacatgaattatatacaagtggaggcctaattgcatttgaatcagacactggaaagtttgaaggaaaaatgtctattagtcaatatcgaaaggatgctgctaaaggacaaacaaaacgtagtgcagcttcacggtcacgtgaagaagatcattatgatccgagatcatcaggtcgactcaagagtgggatcagacgagcatatcgtcaattctataatattgaagattctgatgtgcaggaaattatcctcacaaacaagaaaggagctccaattcttaaaattgggagtcttgatgaattgaaccaacatgttgatcttctaaaattctcagatccagaattgtatgagttgtatttacatgctcgagataaattggatcttgacgaacctgaaagttcaagcggcttcactggaaagtggggtgactatgcggaagatgatgaattcatgaagatgatatcagctttagattcgttaacaaaacaagcttcggaggaagcatttataccagttcaagtgaaacttcgagatgggcgaactgtccaggcaaatgtcgcacgttattggcaaaaagattatccaactggaaaatctgtgaagcaatgggctcaaactacttgggctccaccacaattcacagctcttcgagaaagggtaggaaaagctcttgaactgattcctgaatcgcgaccaattcatcttcatggaaaagtcccaaatggaacacttatagagttccaagatgcaatgaaagatctgcacgagaagacagcagtcaaggctgtagctgaggctaaaatcggagatactcaatttgaggcggatccttctgatgtaacaagccgggttggtgtggttatggtgaaaacatcagcaaacgctgaatgggaatcatggaaccaatgtgttgctttgaataacatagtgatttttccccatcattacacgcttaaagatggtaataatttgagattcaagttttcatcaagtgatttcgaaagcacctgtcacattgtggatgggtacaatgggcttgacatggcttgggctccaattaacgttaaaattcgtggtttgaagaagaaagtttgtttaggcacgccgcggaatggatcttacctatggcatttttccatgattaatcaagggaaagatttgccagaggctcgtcttatgggatactcctctgtaacgaaagtacaagaagagtcgcacccatccttcgattggacacatacagtctcaacgcaagttgggaactgtggtggaccctttgttgataaacatggtgtcattgttggatatcacactggagcttttcaattgggacaatttaatactttcctgggattatcagcaccactaattgcacatctgacaaaattggatgtcaaaccaagtgcccagccccaatcaaagatgatttggagggaagtggatttttatcgatcaccaaattacttacccccaaccattaataaccaagagccaattccagaggagtggagatatccagaaggtaaatctgtttacccatgtgttgatccaggatggatgggttctcgtttggtgaagggatcaggttttcgtctcattggaaaaatgcaacgtcatgtggaatattcaacgaagatttcccttaatgagcattttgacatgtggatgtctcaagagaaaactcaaaatgagttaactaggctgaacaaaaatcgtgtagagaaagggttagagaaagctttcatcagtcacacgatagcagctcagaacaaggaagctgcaattaaagatacgagcaagtatgctagaacaacgttgggaacatattcagaacctttgttgaaaagagcgactgctctgacaatccaaatgctcgaggagcatattaagctatgtaaacgccaaccactggatttagtctatggggatatggaatggaacacagcatgtggagcccagtacaatggattgaaatcagcatttagggatcaagttgttggcatcgagaatatggatgcttatggtcaatactgctgggagcgtttcaacgttccaaccgatcaatacaaaccatgcatttggacaaattcattgaaggatgagttacgaccaattgaaaaagtgaaggagaataaaacgcgcactttcactgcagctccaatcgagtttgtaattggtgctaaacaagctgttgatgcattcaatcatcaattcatggatgcacatttgaagctaccacataccgttggtattaaccaatggtcagggggttggcacaaactatacaagaagttgtatggtaaaaactttgtgtactcaagtggagatggaagccggtttgactcaagtccgtgtttctatatgttcgatgccttgtacacaatacgtacatattttgcagatcctgaaatacaccaggttctggagaatatctacttggaggtttgtcacactccaatagtgttacacgatgggaatgttgtgatgaagaatcatggaaacaatagtggacaatgttctactgttgttgacaatagtctcattatgatgattctatgttgcgcctcttatctagagcacactccagctaccatgcattccctcgatgcaataaaaagccattggcatttttgtgtgaatggagatgattatattggaggaatgtcaccattgttagcaagccatttgactaaagagaagatggcaaaaaccttcagtgacttccagttcatatatgagtggtctgattattcaccatcattatttgaacaagattatatgagtttaaaattcataaacattgttgaacgaaaaggacaaacaactggacaacagttaattgctccatggcgtgaagcatcacgacaactctccactttggctcacacatcaagtggtgcacctgaaatcaaattacaagttgctctaaccgagagggtgaaagcatgggttgataaagatttatttgatttcataacagaatactgcagatggctcgtggagtatttcgatagatttacgaacacgcaagcatggaatgaagctaagaagttatggtgggatgaacaacaaattttcaaccattatttcagttttgaaagcatttgcaatgcgccatactcacaaattgtaaacgaaactcctgatgagttctttgctaatggtgtgagagagtcccgaccattgcgaatcctacgcgatggcatcaaatttggtgttgctgttacagcagctaattatctgggaccaagcgatcacgatgtacccatgattgcaaacacaatgcttaatgttgccaagataggtctcgcaaattcaacagccgagcggattgaccgtatgctatttgggaaggaaaaccctgaacatagtagagcggattcgctagttgttgtaaaaacagagcaaacagatgcgacgatctgtttgcgaactcactgcaaatgccaagcacagcacttcgatgggaaatatgagtgttgggtgagttccccatctgttgctataaaaatgtttgcaacattaaagccccggattctttccacaacgaaatttgttggagttaagtttctaccaaaaatactaagagctcatgtatgggccttatacctatctggattctcttgggaagaaacaatgcaaattgtgcaaagtcactaccctggcgagaaacagcaaagaaaagcggattggttcctacagcaactgctgaaagagctagtattgatattcaaagtgaaagggtcgaagtttattgagttgggagagcatgctcaagttcaagggaaaactcaactcgactctacacaagttgatatggatccaaattttaatgctgcagcttatgctgcaactcttcgaggaggaccgcactggggtacacataattcccaaggtctgtttgatgctattaaggtattaaaccccaatgcagcaaatgttgacattgggaatgcgcgaactgcggttcagcgcgagatgcagcggttgatagctgccgatgctccgcgacaacaaccaccaccacaagttggtggaggacaccaacaaccacctccagctggaggtcaaacgcaaggccagcctggtggttacacaccgagccaggcatttaccaataaatttggtaatataatggctgagcccgatgcccccctcgtgctcgactctcaagcaacaatgagggaagttgcccaaattgaggcagcttgggctcgtcttctagaggtgcaatctctagagggtcttggttccttctggaactacatgttttcctatgtgggaaacaatggcacctcatctggaggtgatcccagggattacatccctgcaggaaatgggcgagttacacttgcccaactaaagtccaaagctcaaggtgagcaatggcgacgttattggcgtagtcatgcgtcagacatgagggatttcttgaggcttcttcaagcttcagatagacctttgcctattcgttgggcaagaaacaatggcattaaagatgccaattacgagattgcattcgattttgcggatgcactcccagatctctcagctgcacaaatgtcaattattttagcagctaagaaccttgccgtaaggcgaggtcaaggccagatgcttaatgctggcaccaaggttggaggtcggtcaagaaccgaaacctatgaccaggctgtccgcgatgctgcggatgtccaattcccaggagcataattttattatgcaacacaacactctttttgactggggggtgatgtgtctggacttgttacagtctttttctttttcaagtgatgtggaatggaccttgaatcaaataacatttgattttggattcacatcattaatcttcaatagggtggatggccctccccttttggagtcgtacaggacgtatcctgttttatttagtaacatagcaataaacacaaaccaccatgtagatagccgtttcagtggtttggttgtgtgtttttcatttctgtcagaaaacttccaaaaatacaaaaatataaaatttttattttgtcattttggttcgttgggcccaagcgtcttgcatagcatgtcgttcattcctgaaacgagtcccccgatagtttcacaattagtgtaccggacaccttttaaaatcattttcacactttgtgatgaatttgtaaggcgtgtgcgcgtgaaaccgtggtttggacctttggaaagaggctacgctctgtaggtagttttcgatagaaaatggtttcccttaaggaaactgttttgttactttggagttccggcccccaaagtaaatttt

SEQ ID NO: 1501 - DNA, 6552 bp, Black grass varicosavirus-like virus
  source 1..6552: mol_type = other DNA
cgccaatttcaaccctcccctacttccgattgtgatttttcatcgcatcgagacacccacaggtacagggtcctagtgtctctaacaccaactagaattaatggtattgattttatgtactaaattgtcatctgttctacaggagagacggcagagtttcccaagcacaagcgagatcaaggccacgcataagctcgacaacagagcgtgcaacatcacaagctcataaagctcaatggatactctggagcacgctgaagccaatgagctagaagacgatgattactttcttcctgacgaaggacctcttcatgatatgcacttggctagtgcaatcaacttggatcagatacaggagttgatgtatccagggactataaagtacaagatagatattccctattatttaagggatgagtacatgctgatagaaagtttgtgcaaaggagacaagatcaaaatggagcttggaatgttggctccatctttgaaactgtccaagcctggaggagaattgtcaaccatggatttacctgcatataaagaaataggaaaccttgtctgtcaggctttgaggaatagggacatcatgattcctatctccatgaatgatgtggcgctgaagctcccaggagtaatagtctacaggtcatggggtatagcatttgcagaattgttgaagattatatgcacaagagcagaagtgatgaggggagggtctcagcctgtatatcaaggcactggaattgaagcaggtgcagcacattgtcagtttcaagtcaacggcaattggtaccagatcgttgcgaggaagaatctctcaacactatatgacaggcaagagaatgtaatgtatataggaaatatacactcattgcttttgctaatggataccatcggacagaggatttgtttaatggttgccaatcagatagcagaactttatgatacacctggatgggttgatcaaggaaaaattgaccaaatattatcaactggagatgacattctggaagaaatgggaaatgatggatatgaaacaattgctatgtttgaatctcttgttataggaaaggtgttgagagcaactcccgatgacatcacagaatgccataagtttttgtacaactgtatggatgaggtagaaaacatgctactaaactctgctatgagaggaagaatcattgaacttgttcacagatggttggccatatttgacagtttatcgatcaaagagttatcaaatgtcttttgcttatatcgatgttggggacacccggttgtaaatatctatgaagggatggagaaagtttacgacatcggcactgaagagaaagaagttagcccatgggtagcaactgacatattgtgtcagttcagaaaaactttcttgataaattattacgagaagcatcactactatccaaacgtcttgatatcagaagaggtagaaaactcatatgttgctcaatgcattaagaagggttcttcaatagaggagatgtatcctacttatgatactaaggacttcttgggaatcgaaatccagaagatatgggacattccaataacatttgacctttgtcacattcttaatgataaagcagtatctccgaaccagaaggagctaacagacagtgttgtcaggtaccaaaacactacaggaggtcagaacagaagagggctccttagatggttgagaggaaagagcttaaactgcagagagttccttcgggagatagatcagaacgggctccctgaggatgagtgtatcattggaatgtacgagaaagagagagaaatcaagatcaaagccagaatgttttctctgatgtcagaaaggatgagatattacttcgttttgacggaagaccttatagctaagcacgtgctggagctatttcccgcaataacaatgaaagattcacaaaatgtactccaaaagaaattttggaccgttggcggaatgggaaaagactccacattcgacgttaatatcaacatcgatttttcgaagtggaattcgaacatgaggaatgaattaactcaacccatgttccaacagttggataagatcttcggatataccaatttgatatcaaggacccacgagatatttgaatcatcgtttgtatattcatcttcaggcaagtatgttcccactgtaaagtttggaaaactccaagaggatcctcctatggcatatcgtggacataagggaggctttgaagggttgagacaaaaaggatggactgtagctacagtatgtgccttatctgcaattgctgagagaagaaatgtgagaacaaaactgatgggacaaggagacaaccagatagttagaatactgatgcccacccagagatggaaatcaaatgagcttactatcaaagaaatgatccaaaatgccaaacagatccaaaaagcctttgtaaccgatatggagagaacatttgaagaggctaaattgcctatcaaggtgagagagacttgggcttctacgagactatttatgtatggaaagatgatcctacatgacggagatgcgatgccccaatggttcaaaaaagtgctgaggtcatacgctctaaccaatgagggtcaagtcactgtagcaggggtggtaggaactattgctactaacatggcttcagcggcaggattgagtgaaatgcctgatgtcatgtatctcatatttgtagcaatgactgagtggtcgctcggttacttgttagagtaccacccattcacacggaaatgcatcctaagagaacatgagtaccatgtaaagatccccggagcacatagaggaagagattatagggtgaggtcagttaacaagagaagattggtagtttctatgatcctgataccaacggcagctggaggaagtgtaacagttcctctccctggattcattatgaggggattccctgatcacgcctcagaggcttatgcctggatcaagatgcttgcggaagtaaagagtccatacaaaacaatgttaaagaactggtacactttcatcgggaatgattctatccaacctgatatgttgatccagagcccgtcatcaatcaacttcttgaagccgccaacacccagctttcaagggagaatgaacgtaagagagctcttattgtctggagaatttgatcagaaccagttcatcaaagaagcaggaacaatattgggagtctttgacaggaagaaggtctgctctgcgatgttaacagacccaatgaaccctttcataacctcagaggtttattccacttatgcccatgtgtacatagacggagtgataaaaagagtagaaaacaccagtactatcaagaagttggcccaaaaggtgaaaaccaagactcaagtcattaaggcaatgatgtacaatgaacataacttcatcatgttcataagttggagagcaatgaaaagaggtaccatcgactatgattgtgcaacccagcaagctagaatggctaggaatattggttggggaagaacaattactggtgtgaccacacctcatccagtagaattggggattggtcatatatgtaaaggtagacaagatgaatgtcctccaacggattacatttatgtcagaataaatgaaaagggagaatttgtcccttatcttgggtcaagaatcaagtgtaaagtcgtatcagagcaagatatagatgccagaagagagccactgattgctgtgggttcgcgtatatgcaggtactcgtcgtggcttggaattggcccaaatctgatggaaattgttgagaaaaacctagctgttgtctgtgacacatctgtctatgacaaatttatagacgatgatccaaagggactgttgtcatcaggatctattgatcatagattcactccagcaggagcatctgagggagttttcatcaactatgcaccacagattggttgtaatgtgtacatgtcgagcgattgtatgccgacctatggaagaggccagaccaactacactttgcacttccaggctctatattgttggctgcaatacatctcatcaaggagggctgaaagtgtattcatgcatcatcacatagagtgtgaagattgtgtcgtaccaactactgatgaagtccccgacatccagtgcccctttccctatttcgataatatatatcccccaagagtaagggacagcatatcaagagccttgggattcattgataggaaaggaggactagatattatgagcaatgtaagatcattgtgtcatgaagctgaaccaggcatgtttgatgttagacaattgcaaaagggagtgatgtggacactagcaataaagatcggatttcgattgtaccatgggggattattcgggtcagatgataccagagttgaggaccttcaggagtatcccaggatttactcatataaattatacagagataccttactggtcaatgtggcacatgtgatgatgatgcttgcagccatagagatggataaggcacctgatggtgaggaactcgcaaaagtcagaagaagagcaactgataaactgttgtcgaaacccattggaagcttcaaggggttaggaggattaactctaggaaggactgatgagaatccagataacagtcatttgtttatgactggctcattcccagaaactgtattctcaatattgaatacttccaagactgcattaatagagacaattggtcagattggacgcttatccatcgaaggaatgggccatcttcctgtggccaaaggttctctgtccaataagcagtttcgatttctgataatgatgagatgtttgttagaatgcaggaactctcattactttcaacactttcagaagatcccagaggacgaaccaggacatccagcggaccctcaaaatgacgtttatagaatgcttgtcaaaactcccgttctagatatgagtctagacaagatggtcaaatcacttgctgttattaacgaaagaaagactcttccgataatcgaatggaataacatctccttcgaatcaacagaagtgatctgcaggacaggaactcccaggtccatattcatcggaaatagaatgatcgttgagcaaaatagtagaagagagtacagagaagtaactcttccaacatctagcatttacaagtgggctgggatcttgtttcacaaacccttgaaaagacatatcattgtgttgggagatggaacaggaggaacctcactgttggtgaaaacattcaatcaagactctacagtgtacccttgctcctatttagaaacccataagattattccccaagatatggaatgtttaatgcctcaattgtctagaggatatgagggaatctccgggcgagttttgttaaatgttccagatgatatcaaggatcctctctggtcagaaagaatgtctagtgagataaatgacatgggcgttgaaaggacctctatagtctgcgatatagagaccgttgggctatgtgttctccttgatgcattcaggagtttacctcaaggagttcaagtagttatgaaaacctatgccaaagatatattgactaatatcatgtcaataatgggcttgaatcaggtagaggtgggattttctccgcatctgaaccagagcaaccatgaagtgtttctaatgggacacatctcacagaattcttttccagatcctgacatgatgatcaatcaaatggtaaagctttatggtaaggtgagagctgatccaagatccagaatcctggaggaaatgaggatgataaacaaagtattcaagccattaaagaatacgtctgtgtctctatctctagctcatataaataatctgggaattactatgaccagggagatattacaactggatggacttgagatctggggatatgcactgcaatttgtaaatcgtcattatgttgacccatctcatagagcatttcttgctgacaagaaaacgatgaacaggaaaagaaagagagatttgacaagggcattcaggatattgctaggagtggttgtgaatccaggatacctggatataaaacgcaaatggggtattagaactcccaaggaattcaaaccaagaggaatgaaccttatactagccagagattgtgatgatatgggtgtcaaattaaccaagaaggacaaattggcctctgaatgccttcattgcttttggaccaggaagatgaggaaagctcctctagatgcaccagatccaccgggggaagattggatggaaagtgcaacaagagttcgatcatttgccagcagtttatctgagcactcttctcatgattacatcaatgtcattgagacagagtagtaagttgttagtttccgtttgatgaagatggccagcagggtagaagaaaaaactatcaaacttggatacaagcagcagatcttatataaaacatagtatcattcgtaattattgcaccagagatgaatctaaatggcgaccctgtgacctatagcgtcattgataacgcggtcagattgcacgtggaacgcagcacgtatgggtttatgtttgaggcatgt

SEQ ID NO: 1502 - DNA, 11988 bp, Maize suscal virus
  source 1..11988: mol_type = other DNA
caggagtgagtttgcgtctcggttaacgttgttgtagccgtttgagagacaacgtatcgattccaacgccatattcttctcatactcatcaatctcacttgtcctctgtccgcccagacaccaacacaatcgaacatttcctctgatggctgaacagattaatcacgcagctccgcccaggcgacagccaagatggggtgcttcagctatgtcgaacttcagggtaaagacgaaagatctggctacacctgactctgcaaacactccggcccacatgattgggggcgattctcttcagctggtcttcacagataaagaagcccttactggtagattctttcttacatgcctgactctcgccaatgatgaagctgttactgcaccgcagacaatagcctactatttgtctgccatggctattgtatttccttcaatgaagcctgatgcccaggactggattaagcacgcaggttatcgtgttgagctagtagagactgaagaagatctggctgagatggaagaaatccaaccatggaggccaactccagagctagctatgatgtttgggcagtctgtcttgattgtgttcaagaatatctctgctgcaaattatctgacgtacatcagaagcagagtgaaggcattaaaagcccatgtgggtgcgttttctgattctattgatggtggagaagtcttcagtctggctaaagcaatggttatcagagctgcacttggaaacaacgtggagttcaagaagaaaatactgaatctcatgctggccactcgcgaagtcgctggagcttttccggcagcttgcaattatgtgtgtggaatcctggaatggaatgagatgacggcgattgtcatcatatacaagatgctacttctcaccagctcgccggtcattaatgataaggagatcagagatgaggtgcttcacctggctgttgcgtatgaaaagatcaaccaatttgagtatccccagtactttcgcattatggcttccaggagtagagcaagggtcctagagaggcatcactatcaggtcctcaccactgtcgctcaagtggcccagaaggaccagacaccatctcttgcccagtttgttgccagtgttcctgaaaacaatcttactgtgattcggctggtcaatatccatcgtcgtttcctggccaggactgcagaagacatacatctgaaggctgcagcattcctcactgcagttgaagaagaagatgttgatgaagaactccctcctcgtgcttgattaggacagtgaggttatacccaacagacatctaagctggtctctgcgatggtctttggcggctgagcgcctttttgtttttggtctacctcatgctttctcttttgctcttggtggtgagcagtcatctattagtctgtgagtcgttggttaatgtctcagtctttaatgctactagaaaaaagtgagaaacgacgaacttgaaagaaaaaatggagcggaccagcaagctagagcggctcattgcgtctagaagtctctcattcggagaagctttgatcgctcaatctctactaaactgtgcaggtcgagatcacttcatgtcatgtctgggagacactgagattgtgtttgtctgtaaccaaggagttgacccatctctggtgagaagactaatcaccaattgcaccaagaggagtgttgtgcttccatttcgcttacttgagttggccacttgctcgatactcacatccgcgggttatgcagcagcaactctctgtagtttaatcaacaaaatcctagctgggcgtgaaaacaggtttcttggagtgatgtacatctcatctggcattaacttcaacggcttctcatctccaggtgttttggcatggaccctccagtactgcggaccgctgatggtgagatctcaaagcgccagaaagacgcttggtctagtgttcgttgactcccaggtgtacagaacttccacagcctgtgtctttgtagactgccagtgggaagaagagattctgagtctaaccacagtcatcgaacgagtcaactcacataccatgaattatctgagttctgttgaaggcaaagctattttcaagcgtgctgccctagctgtttgcgcctatttcaatagtgctgcagactggtgaaggtcctggtgtaggtgaataaagtaagaagatagaagactgtgcacatgtaggagattcccctaataagggtatgtgtgatatttgcatgtctaggtagactgaatgtattgtaagtttgtcgtgcagcccacagccaacctctgatggcagcttgttgtctaactttgagccttcttggcagttggactaagaaaaagtgagagaccaagcgattactgtgtttctcaaccttgcgaaaaccggagctagttgacagcacgcgtgagttcaaggcgcaaactgcaatggcgagcggaagtgggctttcaggtcttacgagtgaaggtgtcgaaagcagaggaactagtggggatttggaagagctgccaggaggagggctgtccagagaagaattcgccacaggaggacaaaatttattggacattgctactcaagaccctcggtttgaccaggtcagggcacaatttgctgacggtgacgatgaagagggagacgtccctaccaatgaaaacacgttcgtgttcgggaccttttctgggtctccatctgccacccagcatactcaagccagggtcagatcaaatccagtgtttaaaaagaagagtggaggtgcaaatccatctgcaagcagcagctcagcaccggtacctccggtcgcagggaacccttttgggtcaccgcagccatcctcaggattgcctgctcagcaaccgcagctagcacaacagcccccaatgagtgcggctgctgcagcaattgccaagatggaagagcagatccacgcaatggtggctcaagtggattccactttgccacacggctacccatcggtggagtcagtcacgactgacactgagcggctcgctgcaatgatagctgacactccttatctttgccttgagacaattgattcgaagcatgttgtggcagctggaccatgggtcgtcaagataagctctgcccagctcaccctctctgcatatgaccagctgatcttgtctatcgctgggaggtactattcttgcttaccgatggcaccagcagatgatctcacagcacgatttttgcacatctgctcgcgatacggaggaggagaccaattcagatcgcaagaggtcgatgtggggctgaatgcttactggaatgaactgtcaagcgagggagttatccatctgccgactcttgcttccaaggttctgcttactggtgaagctatcgcggcacctcactattcagattctatgactctcgcagatctgaccaagagtttagatgaggtctggcaagtatatccaccgattcggacagtttataacatgtgctaccaagttgcccatgaaggattaaagtttgttagtcctcttcatgatgccttcaggtttaatgatgctgcggctttttatgtggaccggatagcttgcggttctgactatattcgattggagcatgttgtcattacaccaagggcatccaacctccaattcaaacaacctgaaatgcctttagttgtcccggtggcaaacccgccaccagaagcggccacaggagcaggagacatagctgcgcagacagcagctgcaactgggctggtctctgaaaggcgcagaaattctgcaagaactggagctgcaacttcaggcgccactgtgccgggatctggcactggtgcttctttagccgctgtcaatcaagacccagcgcagcctacccctgctgaccctcatagtttgctgaaccaagggttgcctgcacggcagccacctgtgcgagacacctcgaccttcagagatggtgtagtcgacttcaacggtgttttggttaaagttcatcagttattgtcaaaccaggcctcccaagatgcaaagttagaccttattatgcagaggctcagcaacattgaagccatggtggatggggttgacaaggcatttgctgcagtgataacacgccactcccgccaggatctgactcaccgccagacagtcaacagcactctgctccagccaagttcttcagaggcccagaatctcgccagcgggtctactccccctgctccacctcagaccaatcaggtccttgaaatcctaaagatcctggaaggaggtcatgccgacgagctgacccttgagctggttgctcggttgaaggctcttattcttgagaccggaaataccagggccgctcagaacatcaccattgagtcgatcaagtttgagaatgctaggaagaggactgttcagaggatcaaaagtctcttccaccttaactaagtgatgacctggtcagggtgtgggaattgctgtttcactaagcaatgactggtcaaataaatcagtttgagtcagtcggtcctaggtcgtgagccaagtgggtcaagtcagtctagttcctcagttcaagtcgtcgagtcttgggttatgctttggcagcccttcaaaaactagaaaaaagtgagagacttgagaataactttgccatcgtcctcctgcaacagctgagcgcactcttctcgccatggagacctttctagatgaacaatttgatgatatgctatctgaatttgagcaagcacggctgtctcggtttccagcctcacatcacagctcggctttaacatattatcctcaacgccatattctgtcattaatgtctccaaactgtcctgtgaaaccaactccccttctgcgggcatactgtgatgcggtcaataaagtatctgatctcttggggggtgggtgtgatgccacagacaacccagctccagtatactcttatatcttctctcagacaacggcttcttcgccagcctattatgacccagactatgaggatccatacctgctggattccctgcgagcagcctcagatgctgtgcttgaagatattgaagctatagaatctcatcatccgggtttttcgctggataaccagaagttgcgactgctgcggaaagtctcttcacgtctccatgcttcctgcaaacagatatttgcggtgcgaagaatgttagaaaaagttagaaatcaaatccagaaatgtcacatcggggttgatcacaagcttatgccagcagtgagattaggaaatttgagtatacacactgttagagatctcatcttcgtagccggactgcaaccattccccatgcgcatccatatactaaattacgatcagtggctaatgatctacgacacagtctgttgccgtgcaatggtaaaggtggcaactttatggaacgaggaattacgcactgacaatatcccttcatgggagatcgtgtcctcagtttataaatggggcgacgcacttttaaccaactatggtgtctcagcgtatgctattataggagaatttgaatcaatagtgactggtgtcttaattacgttttctgacactgacacactaggacttggtgcctcatttgtcaactcaataatggagaacgcgcaagagcaaagcagagcttataatatacctgcgaatgagacattgaagctgatatcattgcttagaactgttgagtctgtgaactggctgtcagagttgttcggtttgagaaagcattggggaaatccaatggtggacgcgcgagcatcgggaaaagcagttcaggagaaggtagatgaggtattgccagttaaagggactgcacttgtgaaattattggcatctttcaacaggatggttacactgtcattcatctctcagcatgggcaatggccggacggttactacctctcgaactcaagagactgcccgctgaaaagagccttcgaatcacggtctacccgtatcccagagactgtggaagggcatcgtcatgaagactgggcatgctttgtgtttctacccaactgcattttagactcatatgaagatgacctggcattaatatcagataaagctgtcagtgtgtaccgcgaacacttagattcagtctatgtgcgggctctctgtaataagcagagtcagggcacggttgaggaagacagaaggttgatgttagagtacttgaggaaacagcatatgccaatactggatattttcaaaatagtaatgacagacgcagtgccgccccgatggatggccaactgtgctagcatgaaaggaacagaaatgaagcacttgaaggcccgaatttttgcggtgcttacatatgagatgagacagtactttgctgcgtcagaagacatactgaagaacaacttatttaagtataacccgcatcagactatgactatgtcagaaacagagctattgactcgactaaaatcattaactactcaattggatccaaacagtcaaagccggcagctgagtgtaatccatattgttgatttttcgaaatggaatttgagaatgagatacactaatacatgcttggtattcaaatctatagacgatttcttaggaactccaggcttgtttgagaattctcatccactcttcagtgatatgctcaacatggtttcagacccattcaatcctccagcgttaggagtagaagagacagaatctgacactatttggagaaatcatcacgcggggtgggagggtcagcgtcagaagggatggacaatcttaacatctgcactcttgtctgacctggagagaacaaccggagttcatagtgaaatatgcggccaaggtgataaccaggcactactaagcaaatttcctgtccccactatctataggaatccggaagaatggatcaagagtgatcctacggaggttaggaaggtgcttgacgacttctatttgagattagaaaaggaatgtgaagctgtaggtctgaagataaaaacagctgagacctgtcgaagtctttgttttttcaactacgggaaaagactctatttcaaaggcagtgaactatccatgaccctaaaacggttctcaaaaaacataacccagcctaatgactcatacccaacaacagaggctattcttaagacatatgagggttcatcttatgcagctggcctttatagccatccaagtctgctgccatactggatgagtaaattctctgtagcccatcaattattcaacagcttcactaacaaccagctttgtgcagaagccccagtacagatgatgtccacctttgggttcccgatcaactaccgactgatcagcacgttgatgaagatcccagcatctctaggtggcccacctcagcagtgtctggctgattatctgctacgcggccatccagatccactatgcactgatttagtcgggttgacattgaagtcaaaggccgggtgtgtgatctctaagaagataattcgtctagctcaatctggtaaatggtttagccaacgcactctgaccagagattccctaatcaaatctccttattctctgaacctcagggtcccattatcagttcgacaaccaattgaagaggctgtgctcccggctgtgcgagctcactgcaacaataacttagtgaaatctctatttgatagctcgatggatgacgacgagagatatattcttgactctttaggtcttatgaagccgttccatccgctcgtggccaacgatatttattcaaggactttaccaggaagaagacagatgtttatatcaggactggcgaataccacgagcttaggtcgcctgattaaagggaattctgcgtttcctctgatctacaaagtcatggatttggagatggagcagctaaaaagctggatagtccagctaacagagcttctcggtttacctgataatgatgatattattcttcctcatcatatattagcgcaacagctgcgcgagaaatcgtggaatacagtcattgagggcataacagttccacatccgttagaacagttcatgcttactctatcaaaatcggacgtctgcaccaacgactgttatacagtagaacctgagcatattgtattggttcaacactccgaggatgtggttgtgtctcccggtgtggaccgtgaccacatcacagcagcgcggtcaaagaaagggagcccctatcttggcagccatatcggagaaggcattgtacagaagcagcttatttgtctaaatccagatacttcctggagagatgtcattagactaaacactatcaagcgttgggtggctccagaggggtctaggctgaggttgtttatgaatggaattataagctcgcggactaacatatctcgtgcctacatagatctcgccacaggcgttccgagtagattgtcttacaaccaccgggccagcctgatggggtcaataaacagctgctctatcagttcgaccacaaacatgcacacaaggttgtacttatcctcgaacagaatgggagattattctcatggtttgaaaaattatcacatgcctttcgggcccacctttctctgttatcagacgctcgtctgcttgatcgggatcttttcacctgagaaatgggcattccctagaaatgtttatcatattcatgtcagagactctagggtgccgccggtgtacgatggcgggttagagctagaagacctaactgtccttgatctgaaaggacacccgcctaccatccttaggtgcttagcctccaaactggtattcgaagcagcaccaggatatgcatcgttcggattttggtgtgagttcgaaacagcatcgaggactgatgcgaaatatgggtatgcccaacagctgacgggtggtttgttcattcaggagacggttgtaagagaatctataacacacgacaggattgggagctttgcatcgagaccggctgtcatatcaattggagacatctcattgatcgagccatctctattccttcgttccatcgcctggggtatgctgttgctcgcacctatgcatctgctgcatttcagaggcaaatatgcattcaaagtttcctgcgtggaatatgtcaatcttttcagccgagctttttggtcttcatttgaatccccaatgagcaacccccgaataattaggaagctcggaaagcatgtcgcgttgatgtctagtcatagtctaggtaggctagattccggcatcatcccagctctgcagataataatcgttgaagagatgtggtgtatcatacattcgatcgccacctatttccgtcgaggaggtgataaaccgaatatcccccccatctttgccccatcgggttctgctgccctactcctcacctcacgagtgatagaaatgatggtcactatacggctagtagttgggaactgcagcatcagtaagatagtagggttcccaagagatttctcggcaaatcttatgagtgtgccgcagccaatatctgccgcagctctgatcgtgatacaacatgacttcttagaattgcagcgtcacttgaaactgccattacgggacatggtgatacccagagtgttctcaacccattacccctgggttgatatcttaaggaagactgacagtgtggaggcagacgatgaagacccgcagaggcaattagtcctcccagtcgactttccgcagtgtgctaatgtagtagaatttcgtatccctgagaaccctgtgttggagactactccacaatgtgactgtaaaacgacacaaagaaagagagatttacatgatgaatgtttcttttcgctgagtgggaactatagcaaatcccacctcaaaattctggagttgatcttttcgttccacctgcctatagcaaatctctgcgtgcttggctctggcactggttctgaagcatgtgcgttaagtaattatctggactgcagacaggtttatgtgaattgctaccacaaactaactgacttctccccgcatgctgcttccacttatgttccgcctgcattcaggtctgatggtatagtgactaagctcgtctctccagcctctgctgtcctaagtctgtcagatctcacggacatcaggactgcggatgctatatatcagcacttaagaggtattgctacaactggtatcatttgcgatgcagagattccaagtgcagcaactcctttactctactcacagataatgcatacaatagtggcagttgtgaggaagaaagcctctatcaactgggtgttaatcaaagtgccgatcttctgtgttcataagcttcttggcctggcagctccactagctcaggccttccatagaatcatctttgcttatccagacttcgggaagcctcattcaagtttggtctatattgtcgctactattcgggctaaggcaactccaattgaagagaataggctgcctactgtaatgcttgaagacgagatgctcagagagatgttggcctctatcagcagtcagaaccattgtagattatatgagatgagggtagcggatagaataagtcggttaagccttaatctaacccttcctcaaagcttgactgtggcttcgaatcggtttgtgcaaggcctgatcctcactgaagacgaaatctccgacccggaacaagttataaaggtactgaaggctgtgaggcaagggttgttgacctcagcacagaaagtagttgaaactcatttccgagttcataatgaaatcacaatgccgaggtcagctgtcctctctgcggatttaggaacccttcacggacagttaaacaacacatacctgaaagtcgctaaatgtgatctgctgttagagctgttgcaccttattcatcctaccctcgaacagatcaagaatcgtgtgtacagctggttggctacagcccactcgtatagaatgagaaacaggaacttcaatgtctacatcaaccagaccagatttatatcacatgattctagatatttattcgaaatccttggacatcttatgaaaagatctgttcccacagttggactccccatccatatggattaccatttattcggatctaggacactgaggcctaagcaacttattgttccttgcccaataggcgtatgtcgaagtccatcaggtagaactagcaaatggaagtggcagaaacgaagtgagatacttggttgggcaatctcattaaccctcacaaatttaccgatagcagttgaggatcataatagcttttcgctggatttcctacacgaaaaaggcatcttagaagatgttcgcatgatggcctcattaaacccatcccgcatagaggtcccttacttctttaggcccaatgagatggccctcgatttgttggcgcatgaccggttgttccttgttgcgccgttgaattctttctcactactcagaagccgttacacaaccgttgagccatactttgttccttggtcgggggcccctttagcttggtgtctattttatctggaggagcggaaccaaattgatagcctgattgtggatgagatctgccttgatgatactctgtcggtcaacacttatgtcgacacagacagcatgtcctgtagatgcctgagctgcaaaacggaagaagtcttgggagagaggttttcgttaaataccaacgatctggatttcctgtgttctcttggatctatagagacagtctatgattctgagcatgctttgtaggggcttatcgctcgcagggactaataaaaagtgagtatgtgtaagctgagccaaagactgtatcgccagttttatctaaaagtttattgtgaacttaatttaaagttcctatctgttcccatttaataccattaagaatgtggtcccagctcacctcttgtctagtccaattaagctgcagattgtgttgggtatgacataggacatatgggagtgacaaagttgaggtaataggagaataaaagtggaatcgacagtagtatcggcttgtacaacgttgagcgagacgcaaactcactcctg

SEQ ID NO: 1503 - DNA, 7954 bp, Horseradish latent virus
  source 1..7954: mol_type = other DNA
tggtatcagagccatgagtattgaaaaatacataagatcttcggatcaatataacccaataacaaggttatacgaggtatatacgcatataccccggatcggcagcgtagagatacgttttgctaagtcatctacatacggtgtagaggacacatccgctaggatgagcatgtatactgccatcagatccgtttgatggtgcgcgtactaagtataactaagttatataattgttgaaaaacaaaatggatttatatccaaccaaagaggaagatacccctcaaaatcaaactgagaaatacgttttctcaaaagaagattcatctggatattcggctgaattaatggtcaataatgacttattaaaaactatttctaaaactaaattaactttagaaaaagaaaaagtttttagaatgacaaatcctttaacctcaatggttaaaagcctgtgtcagagaaagaaccacatattctattgcgtaactacgaaagagttatcaatagatatttgtgaatcttcaggtaaagtctacttacctcttctaacaaatgaagagataaatgggcgattaaccaaagtcgatccaaggatcagacaaacactctctattgttcatataggtgcagtgaagatattgctcaaagcgcaattcagaaacgggatcaactctcccgtcaaactcgctctcattgatgaccgaatcaatgaccgaaaagactgcctcctcggagcagcaagaggtaacttaaactacggtaaatttatgtttaccgtttatccaaaatttggtgtaagtttaagaactaaaaggttaaatcaaaccttaagctttattcatgaatttgagagaaataatttaatgaataaaggagataaagttatgaccataacctacttagtagcttatgcactaacaaatagtcatcacagcatagactataaatctagttctaatattgaattagaagatgttttccaagaaattggaaacgttgaacaatccgaattttgcattattgaaaatgaagattgtaattgggcaattgatattgcacaaaacaaagctgaattgggtaaaactaaaaagcttatatctgataatcaattaaaaattgaatcaggagaatctagtaatggtgaattacatagattaaatgaaagcgttaataaattacgcgaaaaatttgtagaaatttgtgggtagaatgagtgatctcaccaaacttccacacatctacaagaaaggtgaaacgatagttcgtttaaagccactggcaataaacaagaacgatcgggtatatgtgtttagctccgctaaatccaatatacaatcaatcaccaactccttgaataatctcaatgagattgttgggagaatactccttgggacttggaaaatcaattcattttttggattatccaaagatccctcagagtcaacctcaaaaaacccatctgtttttgataatgctaaaaccatttttaagagtgggggggttgataatacagcgttactaaaagaaatcaaaacccttttagaatcgcaaaacactaggattaaaaacctagaaaaccaatcgaaatccttgacggataagattgaacctgaacctttaaccaaggatgaggtaaaagacttaaaagagtcaattaggtttatccgagataagttgaaagacataatcggataaaactggcgaatctaaatcagattcaaaaggaagtatcccaagccttagaagagattaggtctctaaaaaaggatacagaagccattctagcaaaattaggatcaaccgaacctaacaacctagaagccattgccgcaaagataatcaatgacgttacgaaagtaatacgagattgtccttgtaacaaggaaattctggaagcttttgctaagcaaccagagaagaaaggtgaaataatcccttccaataaacctggatcttcttcatccaagttaaagaagtattcgtaccccaatactggagtaggaaactcaaacctaggtagttctgaaaaccctaaagcccttacctggccttttggatcatagaatgcctagaaccgtgggtcaaaccatagatgacttctggtcaaatctaggtgtaaaccagctagatgaacatgagttcgatcttatgatcaacctcatgaccgacgatgatgtatcctcggatacatcctttgatagtttaacctctctcttttctgagttattacaggttgaacaggaaatcacttcggaagaagaaagatgccaacttcttgaaaaagaagacagttctgacgaatccatacccaacgattctgatgaagaaagcgttcctgaacaagtcaggatggaaaaaggcaaaggaccggccaaaccatacgactacttcgacaacgaaagcagcgatatggaatatggagattacaatccatacggcagaagcgggcaaacaaacaaacccgcaagaacacgaccaaaattggccagtgaaacacttggacgaaatccaaggattctcaatctcgactgcaccaacagtctgagagacagaaaaagattagtagaagaatggggagccgaaatcagcctcaccatccaaactaatctagacgaatattccgaccctgacatggtgttactattaatggagcatctgacggccggaagtgtcaaatcgttcatcaagacaacgaaatggagtgaactatccggaggaatctatgaccttgtcatggaaggaattcacgtcatgtttcttggcgaacaaccaaatgaagctttcgacaaagctaaagaacaagcagcagcaaaggacaaactccttaagatgcagctctgtgatatatgttctctcgacacattcacctgtgccttcgagaaagcattatacaaactcgattccggagactttcctccaattatcgagcaatatctggcgaaaataccggaggtaggcgccaaagcccagcagcgatacaaagaagaagctactggagcaatgaaatacagtcttggatttgccaacaagattgttaaggaagaattgaagaaggtgtgcgagctcaccagacttcaaaagaaactgaagaaattcagaaaaacctgttgcaaacaggttgaagaaagattggaatatgggtgcaggcccatatacaaaaagaaatccaagcggaggaagcccaaagtccgcaaatacaaaaagtacaaaccctttaaacgacgaaagaagtttaaaacaggaaagtactttcggcccaaaaccgaaaagaaagtttgcccaaaaggcaaaggaaagaattgcaaatgttggatttgcaatgtcgaaggccattacgccaacgaatgtcctaatcgacaaacttctcagaaggctcacatccttcaagaagccattcaacttggtctccagccagtagaagacgtctacgaaggagaacaagaagtattcgttatcgaatacatagaagtttcagaagatgaaacctcaacctctgaagacgatggaacatctacttcagaagactcagattcagactgagcaggtgatgaacatcaccaacccaaactcgatttacatccgaggaaggctatacttctcaggatacaagatcgtggagctcgactgtttcgtagatacaggagcaagtctgtgtattgcaagcaaacacgtaataccagaagaaagatgggaagcagctcccagaaagatcaacgtgaagatcgccaatgaaagcacgatcacgctcgataagatatgtcgtaacctcgacatcatcattgccggagaacgattccacattgacgtcgtcttccagcaagaaagcggtatcgacttcatcatcggtaataacttctgtcaggagtactctcctttcatacagttcacaggacacattgtgttcacgatgaaagatcaataccaagtaccaatcacgaagctccgacgagctttcaagagaggaattcctggatttttagaatccatgaagaagagatcaacggctcaacaacctgaaccgctcaacatctctacaaataaaaccgtttcactttcaagggggaggaggtttggagaaaaactcagaatcacccaagaaaggatggtaaaaatcgaagaactacttgaaaaagtttgttctgagaacccattggacccagagaagtccaaaggatggatgcaagccagcatcaaactatcggatcccacgaaggttatcaaggttaaacccatgaaatatagcccaatggaccgagaagaatttgagaagcaaattcaagaattactggacctcaaggtaatcaggcccagtaaaagcccacatatggcaccagcgttcttagtcaacaacgaagctgagaaacgcagaggaaagaagcgtatggtggtcaactacaaagcaatgaatgatgcgactgtaggcgacgcatacaatcttcccaacaaggatgaactccttacgctcatcagaggaaagaaaatcttctcttcctttgactgcaaatcaggattctggcaagttaggcttgacgaagaatcaaaatccttaacggcgtttacatgcccacaaggacactatgagtggaacgtggtccccttcggcatgaagcaggcaccatcgatattccaaagacacatggatgaagcattcaaagtgtttaggaagttctgctgcatatacgttgacgacatcctcgtcttcagcgacaacgagcagaatcatcaacttcatgttgcgatgattctccagaaatgctatcaacatggcatcatactttccaagaagaaagcacagctcttcaaagaaagaatcaacttccttggcctggagatagatcaaggaacgcatagacctcaatcgcatatcttggaacacatccaaaagttcccagatatcattgaaagcaagctacagcttcaacgattcctcggagtactaacatacgcctccgactacatcccgaagctagctcaaatccgaaagcctctgcaagccaagctcaaggaaaacgttcaatggagatggactcctgaggacacattatacatgaagaaggttaaaaagaatctcaacggattccctcctcttcatcatccccttccagaagagaagctgattatcgagaccgatgcatcagacaactactggggaggtattctcaaagctattcatatagatttatctactaacgaatctattgaattagtttgcagatatgcatcaggcagcttcaaacctgctgagcaaaattaccatagcaacgataaagaaacgcttgcggtaataagaactattcaaaagttcagtatttatctgacaccggtaagatttctggtaagaacagataatacgcactttaagtatttccttaatattaattataaaggagattctaaaatgggtagaaatatccgatggcaaggttggttgcaaaactatgtctttgatgttgaccacattaaaggcactaacaattgcctcgcagattttttatcaagggaattcaatggagcttagcgcgtcttttgaaatccgtcaacagaaacgcgacacgcgtaaaagatgacaccatacacttgtggtgagaatcaataggccactgcctatataaacactctatcaccgatctgaaaaactcagatcctcaaaatggaggaaatagataaactcttacttcaagagaaaatcttattactagagctcgatctagtaagggcaaagataagcctagctagagccacaggctcgatgcaacaaaaggaagaaattccttgccgtgaaacaccggtaaatactctcacgagtaaattggttattatggagccagggcaatcgtccaaatctataactattccagagcaaacggctcatggtaaagaatcaacaaatccgttgatggctagtcttttgccaaaagagacaaaggtggtacagaccactagactggttaaaccagaggactttttacgtccaaacatgggtattccaatcccagaaaaagctgagcctagcagttcagttggtcctaacaggccagaaaaggagattcaaactcctcataacaactactatgttgtatataacggtccatatgccggtatatatgacaattggggttgtgccaagtctgcgacaaacggagttcccggagttgcacacaaaaagtttgccactattactgaggcaagaaagtctgcagacgagttcaccactgctgcaggaaaagataggcttaacttcgtccccaaaggcgaattagtcaagccaaagacttttgcaaaggccgtaacaagccctaaaaagtcaactcaatggatcactctcggaactaaaaagcctaagaaggatccagaaccaaaggagatcgcctttcaaccggagatcactattgaagacttccagtatctctatgatcttggaagaaaatacgatggcgaaggagacaccaccttcttcaccaccgacaagaagaacatatccatgttcaacttcctgaagaatgcagatccacagatgatctcggaatgctttcaagcaggactaatcaagacgatctaccccagtgcaaatctgcaggagatcaaatatcttcccaagaagataaaagatgcagtcaaaaaatacagaacaaactgcatcaagaacactgagaaagacatctttctcaagatcaagagcaccatcccagtctggagtgctacagggcttttacacaagcctaaatacatgatcgagatcggtgtctcgggaaaagttcgacctgaagaatctaagtccatggagtcaacgattcagaaggaagaattaatggaccttgcggtcttaaaggcgcaaacattcattgacagcctaatgaagatcaatcaacgcgaaaagatcttcgtcaacatggtagactatgaaacactagtctactcaaagaacttgaagaagacgactcaggaagacaggagcgtcatcaacaagtttcagcaaaagctgattagtggaaaaatccttggattccactctccagcaatctgccagcacataaaggtgacagcagaaaaagaagattgtgactaccactgcaatcagtgcgaatcttcaaaaggaaaggctatcgtttgcgataagcctgccgacagtggtccagccgacaatggagggccccagacacgtgaagacgcgtctgccgacagtgggtctcggacaacagacaccacgcactcagcaagtggatgaaataattcatctgctgacgtaagggatgacgatcaatcccactatcccaagacccttcacttctatataagtgaagttgcttcatttggagaaggcatctcgaaatctcaacacaactcgagctctcccttctctcttctttatctctctaaatgtgtgagtagaatcccgataagggaataggtagctacagagatcccggcctacgggccaattaaggggatctcctaaaatgtttgtattttcctttgtattatccagaaataaataaagaaaacctttacaaaaacccgagtgttctcccgcctttctctaaatctcatgtatctcaatagatactccgtctgaatagcaatcctccacgggacgctgtgagcctggagacctgatgccgtttgaagctgaagaagtaccgccgaggcagggggccgtttagggaaaaagtaagcgaggctggtttggcagcagtgactcaacctagggagtattcagatagacggaggtagatgaaagacaacgagaaaacaggaagttccgacggacactgttcaggtcagatttatttaaatctgttaatactctcattaaggagattaaccctaattagtggatctaaggggctacttataaacccttatcaatttaaaatcttgttaatcaagaaactaaacaagtggtttaaatgccacaaatcaaccttccgcagcacgaatctggtcgtgcaaaaat

SEQ ID NO: 1504 - DNA, 2613 bp, Bean latent virus
  source 1..2613: mol_type = other DNA
accggatggccgcgcgattttttttatcccttgatcctacggtcgcccgcaattcgcgcttggtccatgtgaatgtgataaaaagtgaccaatcatgtttcgtttgacgagtctaattattgtttcttcgtccccacgtgatggaccaagtgctttatatatttgaattaaatgcttatcctctttaattcaaaatgcctaagcgcgatgccccgtggcgcacaatggcggggacctccaaggtcagccgctccgcgaattattcgcctcgtggaggtatgggtccaaagatggacaaggcctctgcttgggttaacaggcccatgtataggaagcccaggatatatcgggtccaaagaggacctgacgtccctagaggctgtgaagggccttgtaaggtccagtcatttgaacagcgtcatgatatttctcatgttggtaaggtcatttgtatatctgatgtcacacgtggtaacggtattactcatcgtgtgggaaaacgtttttgtgttaagtctgtgtatattttaggtaagatatggatggacgagaatattaaattgaagaaccacacgaacagcgtcatgttctggttggtcagagacagaagaccatatggcacgcctatggattttggtcaagtctttaacatgtatgacaatgagcccagtactgccactgtcaagaacgatcttcgtgatcgttttcaagttttacacaggttctatgcgaaggtgactggtggtcagtatgctagcaacgagcaggctattgttaggcgattttggaaggtgaataatcatgtcgtgtacaatcatcaagaagcagccaagtacgagaatcacacggagaatgcgttactattgtatatggcatgtacgcatgcctccaatcctgtatatgctacgttgaaaatacgtagttatttctatgactcgatttccaattaataaatgttaaattttattgaatgatcttctattacatgagttacatatggtctgtctgttgcgaaagcaacagctcgaattacattattaattgaaataacgcccaaattgtctaagtacaacatgactaaatgcctaaatctatttaagtaagtcgttccagaaactcgaatcaatgtcgtccagacttggaaatttagatacgctttgtgtagatccagagccctcctcaggttgtggttgaaccttatctggatgtggaatatcctcgtcaaggagaacggtggatcctctactcttgttatcttgaaataaaggggatttggcacctcccagataaaaacgccactctctgcttgatgcgcagtgatgggttcccctgtgagtgaatccatgattgaagcagttgatgtgtaggaagatcgaacagccgcactccaagtcgattcttctacgtcggactgccctgcgttttgcaaaccggtgctgaggtttgatagaggggggagttgaggaagatgaatttcgcattatgaagcgtccacgcttttagatgtgcattctcttgtctatccaagtagtctttataactcgccccctctcctggattgcaaagcacaattgatgggataccacctttaatttgaactggctttccgtacttgcaatttgtttgccaattcttttgggccccgataagctctttccagtgcttcatctttaagtattgtggagcgacgtcatcaatgacgttgtaatctacattatttgaatagacaaaagaattgaaatccaggtgtccactcaagtaattatgagaacctaatgaacgtgcccacattgtttttccagttcttgaatcaccttcaatgatgatactaataggtctctctgtccgcgcagcggcaccccttccgaaataatcgtcagcccattgttgcatatccagtggaacgttgttgaacgacgattgtggaaatggaggaacccatggttccgggggtttttggaatatccttgttgcgtttgagaccagattatgatattgaaggaagaaatgttgaggttgttcttccttgattatctgcagagccgcttctgcagaacctgcatttaatgccttcgcgtatgtgtcgttagcagattgctgacctcctctagcagatctgccgtcgatttggaactctccccattcaattgtatctccatccttgtcgatgtaggacttgacatcggagctggatttagctccctgtatgttcggatggaaatgtgctgacctggttgtggagaccaggtcgaagaatctgttatttgaacattggtatttcccttcgaactggataagcacgtgtagatgaggttgcccatcttcatgtgtttctctgcatatcttgataaacttcttgttaactggagttgttagacgttgtaattgtgataatgcctcttctttggatatggaacactgaggatatgtgaggaagtagttcttggcatttaagcgaaagcgtttcgggagtggcatatttgtaataagaggggtgtacaccgattgaggctctctcaaaactgtcataatgaatcggtgtatggtgtacaatttatactagaaccctcaatctcaatttctgcacacgtggcggccatccgatataatatt

SEQ ID NO: 1505 - DNA, 2756 bp, Rice latent virus 1
  source 1..2756: mol_type = other DNA
atggcgaatttctctatcctcactgactcggcctaccctacggttccttcgcctccaagtcaagcggtgtcggccgggtttgaaggtgctctgacgacgcttttcctcgtcgttatcggctctctattgttcgttggcgtgttctatctcggctgggttctctgcgtgaaggacctcgtcctcaccttcaaggcccgccgccaaaggaggaccgaggagatcggtttcgggaacactcccgcgagggttgatgccaggggggtctaagagggcctcgtccgggaaagatggttcgaggccgaagcgtcgcaagggagagcccgaggccgcctttagggcccgcatattgggctgggcctcttcccagttcgggaggagggtctacggtggcgttggttcgtcgcagagtgctccgctgcaggtgcggacgtacaagtgggagaatccggacaagagtgccattgctatcgataccggctccatatggatcgtcaatacgttggacgctggtaacggggatgaccagagacatactcacaagactattatctacaagatgctgtttcagggtacgatgtggattaatgatgccacgtcggcagtctgcgggccactgacagttcatttctggctggtgtatgatgctgcgccgaagggggttcttcctgcccttactgacatattcgaggagggattctctggcctgggttcaacctgggtcgttaaccgggacaacgttcaccggttcgtggtgaagaggaggtggcagatgcgactgatgaccaatgggcagaagccgtactacactaaccgcagtgggaacggagatcccaccagtgtcacgatacgggacttcaggaagttcttcacgaagctgcgtactgcaacggagtggaagaactccgcaacaggagggataggggatataaagaaaggggccctatatctttgtgccatgtgttcgcaggcacctgaggggtccgctagagctattaacctgggggtgaagtttaggggccagagccgcatatacttcaaatgtaccggaaatcaatgataataaaacataatattttattcagattccatagatccgttattacaaggcagtacagtttgtacgacgaagcacagtatagcgacggatggagcactgtgcgtagcgtccggaggaggttggtagggcggtattagggaagaagggcaacatacaataccatacacacattattacacactaagcacccgaagggtgcttgaagaaactatccccttcatacatgtaatgtatcacgcagttgctttcgatgtacttggtctgagccggtgtacattgactcagccagtcttcgtcttcatttaccaggacgatggaggggatcccaccacttattaccttccgcttgccgtacttaggattgacggtgtagtcacggtgacatccgattagctgcttccaattagggcagtacttgaacgggatgtcgtctataacattgtattgtgcggtggggtcataagtggtgaagtccaccagtccgttccaatagttgtgcttcccgaggcttcttgcccaggttgtctttcctgttcgggttggtccgcatacatatagggaggtatatcttctggcggttgttggagcatcctggatgtcaaatcatggacgtgctgtagatattcggcagtagttacatcaagataatccatgttttgacgtgtttgtgtgtatacttcttcacataccgtgtatgtctttatgttctctgtggcccactgactcagctgttcgctgcaacgtagctgatcagtggggacagagcttgcgtatggagttacggtggtggggaagagcttctctgcgctgtactcgaactgggccagcctagttgcccagtcgaaggggaatgtctggcgtaccatagagaggtactctgttttcgaggtggacgaggagatgattttcctcatcttggtgtccttggtgtcagatccaggggccctcctcttgagggtcttcttgctgaacggtttggcgttgtagaattcgccccattctgcaatactgacggttcccggcttggtgatgtagtctctgacctgcttgcagttctgagcaggctgacagttaggatgataagactgatagtcaaaaaacctagagtctttggtctccaggcggttagatagctgtaaaagggtgtgtaggtgaaaggatccatctttgtgactctcacgagtaacaagtatgtagataggtacacgactgtggagcagagtaagaagatagtgaaggagttcccaaggatcaacaggacacttaggataggtgaggaagaagtacttggtccgtacgctgaattggtgggaagtggagggatcggccatgagtgaagcggagccgttggatttggctgaaagggacgtgcgggagaatcccggttgtccaaaggctgcttttcccacaaatctataccctagaccagtgcgatgtgggaagtgccttaggtgggaaccttgggccggctatttatatgggtgtcaaagtggctgtagttgggccttggcccactccagccgggggccggaaagcgaaatcgcactgatataatgttaccagtgcgatttctctttccgagcgcgatagcgcgaggcgccgggttccgcgtaccttctacgctgggtcgcctttatgtgtgatgggacgtaaggggggattcccattaatttattagtgcgctccatgacatcggggg

SEQ ID NO: 1506 - DNA, 2843 bp, Rice latent virus 2
  source 1..2843: mol_type = other DNA
atgtggatggaaagcggacacctaccgcaggtagggtatcaggtgcaaccttctccgccggccgtaacctcgacgttcgttggaaacgacggcgcctggaggtttctcgttttattgaccgcttgttcttgcctagcaggggcagccgtattcgcatgctggcgcatgtgtggtaaggacttgctcctgaccttgaaggcgaagcgtagcaggacgataaccgagctaggtttcggccagacgcctgaacagcgtcgagctggaacgagttctcaaccagtgggcgtcatcggctaacgatcgaggtggagtctggtcttttgggtctggtcagcgtcccagttggccctctagcccggcacggatgccggcgaggactggtagcgctcgtcgtaaacggaaggatgattgggcgtgggattcggccactcgtcgccgtgttcgtccgaggacgtcttatgttccccgtggtggtccgcgagttcgcaggcctagcctgcagtatgtgaatccggggttacttggttccaccgcggtacatgtggctgatacgaatggggaggttagaattataacaggatactcgcgcgggagcgacgagcagtcgcgtcataccaacgagactataacgtacaagttatcactggacctctatgtcacggtggacacagagtgccagaaatatgttggtaaaggcgttgcggtcgcatggttggtctacgatgcgcagcctacaggagagatgccggcagcatcgacaatattcccccatgttgcggatatggctactgcgccctgtacctggaaggtgggtagggaggtctgccatcgtttcgtggttaagcgtagatgggtgatcacgcttgagactaacgggcgtgtagccggtacggtctttcagggtgctaatggtgtcccaccatgtaatcgcacggtgtacttccataagttctgcaagagactcggtgtcagaactgagtggaagaacacctccggtggttcgatcggagacattaagacgggtgcccctgtacatagtgttcgcggcagggaaccagattaattacagagttcagggggttgtaagaaagtacttcaagtctgtgggtaaccagtaaaacggttacatgtaaaatagtttgtaataaaatgtcaattttattcattacaatacaggtggctgcgctaagcagctgttttgcaatacatacacactttacccaattatccctgggcggcgcgcggcgataagggaaaggggtaaacactaaacacgagactgaccttagttaacatctttccggcgctgttgcgccggtgtctgatataaagctgaaattatatagactcatattaaatatgatgcagttgctctcgaagtacgagagctgttcagcagtcattgctttaggccagtcgtcgtcatcgttaacgatgacaattgaagggattcctcctttgatgagcttctttttcccgtatttcggattaacggtgtaatccttctgagctccgacgagggccttccagcaaggacagaacttgaagggtatatcatctattatattatatagagcttcgggatcatacatcccgaagtctacgttattctggtagtaattgtgtctgccgaggcttctagcccaagtagactttcctgtccttgatggtccgcagatgtagaggctgattggtctcgcctgcttgcaaagcatgtatcatgtagccatcgtagatctgcctcagcgtcagaatgaggatggagcaacgaatatacctgcggggttacatggtagatgttctcggcagcccattctgtgagtgtttcatggcaatgaaacatggagtcattgaacggtggttcatatgttaccggtggatcaggaaatagcttctgagaagcatactcccaggcttgcagcctggcgcagtagtcgtacggaaaccacttcttgaccccgttcatgtactccatccttgaggtcgccgagcgtaggatgtcagccattatctggtctttagtcattcttcgtcgcttgttggccagctcggaggaggtgttacctccctcggccgagctggaggaatccccagcagctctcctaatcgtcgtagaaggtccagcctctccattcccagtcggaggaactccgaatgatcctcggggccgaaaggagcccttatgccattctcctgtaggatgtttgagaatataagccagtacagctttagggtttcttgtaccttgtatatttggatgataatccatattatcaaaaaaacttgagtcatgtgtgcgaatgcgatgacgagtctgagcaagagcatggagatggggagtcccatctttatgaagctcagaagcacataaaacgccgtaaggcctgagcagattccagaggaataagcccattgtatgaggctcttggctacatcgtggataagtgaggaagacatttttgttctggaaggcaaagttatgtggttgctcagatgcggattcagtgttggtcatagggttccaacacttagccgcaaaaccgaactccggtgttttactctctagaaccctcttacaggcgatacccgaacgacccaggcttgggccaatttatagttggccggggtttctttgccggcccataccgaggccaaaggggatcgccaccgcataatattacagcgatcccctttgggccgaggggacattcgtgcgctctgattgtccccgaggccttcgcaattaagcatctactttaataaagtgatagtgaaattacgcggtattgcgtgttatccacgccctagtggactacataagtgaggtctttgggctttgttgg

SEQ ID NO: 1507 - DNA, 76 bp, Tomato brown rugose fruit virus
  source 1..76: mol_type = other DNA
gtatttttgttttacaacatataccaacaacaacaaacaacaaacaacaacattacaattactatttacaactaca

SEQ ID NO: 1508 - DNA, 13 bp, Celery latent virus
  source 1..13: mol_type = other DNA
aaaatttaaattt

SEQ ID NO: 1509 - DNA, 235 bp, Black grass varicosavirus-like virus
  source 1..235: mol_type = other DNA
cgccaatttcaaccctcccctacttccgattgtgatttttcatcgcatcgagacacccacaggtacagggtcctagtgtctctaacaccaactagaattaatggtattgattttatgtactaaattgtcatctgttctacaggagagacggcagagtttcccaagcacaagcgagatcaaggccacgcataagctcgacaacagagcgtgcaacatcacaagctcataaagctca

SEQ ID NO: 1510 - DNA, 142 bp, Maize suscal virus
  source 1..142: mol_type = other DNA
caggagtgagtttgcgtctcggttaacgttgttgtagccgtttgagagacaacgtatcgattccaacgccatattcttctcatactcatcaatctcacttgtcctctgtccgcccagacaccaacacaatcgaacatttcct

SEQ ID NO: 1511 - DNA, 200 bp, Tomato brown rugose fruit virus
  source 1..200: mol_type = other DNA
gataatcgagatgcttaaataacagattgtgtctgcaaacacacgtggtacgtacgataacgtatagtgtttttccctccacttaaatcgaagggtagtgtcttggagcgcgcgggacaaatgtgtatggttcatacacatccgtaggcacgtaataaagcgagggattcgaattcccccggaacccccggaggggccca

SEQ ID NO: 1512 - DNA, 583 bp, Celery latent virus
  source 1..583: mol_type = other DNA
ttttattatgcaacacaacactctttttgactggggggtgatgtgtctggacttgttacagtctttttctttttcaagtgatgtggaatggaccttgaatcaaataacatttgattttggattcacatcattaatcttcaatagggtggatggccctccccttttggagtcgtacaggacgtatcctgttttatttagtaacatagcaataaacacaaaccaccatgtagatagccgtttcagtggtttggttgtgtgtttttcatttctgtcagaaaacttccaaaaatacaaaaatataaaatttttattttgtcattttggttcgttgggcccaagcgtcttgcatagcatgtcgttcattcctgaaacgagtcccccgatagtttcacaattagtgtaccggacaccttttaaaatcattttcacactttgtgatgaatttgtaaggcgtgtgcgcgtgaaaccgtggtttggacctttggaaagaggctacgctctgtaggtagttttcgatagaaaatggtttcccttaaggaaactgttttgttactttggagttccggcccccaaagtaaatttt

SEQ ID NO: 1513 - DNA, 221 bp, Black grass varicosavirus-like virus
  source 1..221: mol_type = other DNA
taagttgttagtttccgtttgatgaagatggccagcagggtagaagaaaaaactatcaaacttggatacaagcagcagatcttatataaaacatagtatcattcgtaattattgcaccagagatgaatctaaatggcgaccctgtgacctatagcgtcattgataacgcggtcagattgcacgtggaacgcagcacgtatgggtttatgtttgaggcatgt

SEQ ID NO: 1514 - DNA, 303 bp, Maize suscal virus
  source 1..303: mol_type = other DNA
gggcttatcgctcgcagggactaataaaaagtgagtatgtgtaagctgagccaaagactgtatcgccagttttatctaaaagtttattgtgaacttaatttaaagttcctatctgttcccatttaataccattaagaatgtggtcccagctcacctcttgtctagtccaattaagctgcagattgtgttgggtatgacataggacatatgggagtgacaaagttgaggtaataggagaataaaagtggaatcgacagtagtatcggcttgtacaacgttgagcgagacgcaaactcactcctg

SEQ ID NO: 1515 - DNA, 4845 bp, Tomato brown rugose fruit virus
  source 1..4845: mol_type = other DNA
atggcatacacacagacagctaccacatccgctttgctcgacactgtccgaggtaacaataccttggtcaacgatcttgcgaagcggcgtctttatgacacagcggtcgacgagttcaacgctcgtgatcgcaggcccaaagtaaatttttccaaagtaataagtgaggaacagacgcttattgctactagggcatatccagaattccagataaccttctataatacgcagaacgccgtgcattcgcttgccggtggactacgatccttagaactggaatatctaatgatgcagatcccgtacggatcactcacatatgatataggtgggaattttgcatctcatctgttcaaaggacgggcatatgttcactgctgtatgcccaatcttgatgtccgcgacataatgcggcacgaaggccagaaagacagtatagaattatacctttccaggcttgagcggggcaacaaagttgtcccaaatttccaaaaggaagcttttgacagatacgctgaaacgccagacgaagttgtctgtcacagtaccttccaaacgtgtacgcaccagcaggtggaaaacacaggcagggtgtatgctattgcattgcacagtatatacgatatacctgctgatgaattcggagcggcacttttaaggaaaaatgtccatgtttgttacgccgccttccacttttccgagaatttacttctcgaagattcacacgtcaaccttgacgaaatcaacgcgtgtttttcgcgtgatggagacaagctgactttttctttcgcatctgagagcactttaaattattgtcatagttattctaatattttaaaatacgtgtgcaaaacttacttcccggcatctaatagagaggtctacatgaaggagtttttggtcaccagggttaacacctggttttgtaagttttctaggatagatacttttttattatacaagggggtagcccacaaaggtgtaaatagtgagcaattttacagcgcaatggaagatgcatggcactacaaaaagactcttgcaatgtgtaacagcgagaggattcttcttgaagattcctcatcggtcaattactggttcccaaaaatgagagatatggtcatagttcctctattcgacatatctctcgacaccagtaaaaggacccgcaaagaagtcttagtgtcaaaggattttgtattcacagttttaaatcacattcgcacttatcaagccaaggcacttacatactccaatgttttatcctttgtcgaatcaattcgttcaagggtaattatcaacggagtgactgccaggtctgagtgggatgttgacaaatctcttttgcaatccttgtccatgacatttttcttgcatactaagcttgccgttttaaaagacgaattgttaatcagcaagtttagtttggggccaaaatcagtaagccagcatgtatgggatgagatttccctggcttttggaaacgcatttccatcgatcaaggagagactgctaaatcggaaactaattaaagtgtcgggagacgcattagaaatcagggtgcctgatttatatgtgacttttcacgatagattagtgactgagtacaaaacatcggtggatatgccagtgcttgatatcagaaagagaatggaggagactgaggttatgtacaatgcattgtctgagctatctgtgctcaaggagtcggacaagttcgacgttgatgttttttcccggatgtgccagactttggaggtagacccaatgactgcagcaaaggttattgtggcagtgatgagcaacgagagcggactgactcttacattcgaacagccaactgaagcaaatgtcgcattggcacttaaagattcagaaaaagcctctgagggtgcactagtggttacttctagagatgttgaagaaccatccatgaagggttcaatggcaagaggagagttacaattggccggtctgtctggagaccaaccagagtcttcctatactcggaacgaggaaatagagtcattagagcaattccacatggcaacggctagttcgttaattcggaaacagatgagttcgattgtgtacacgggccccattaaagttcagcaaatgaaaaactttattgatagcctggtagcatcactctctgctgcggtgtcgaacctagtcaagatcctaaaggatacagctgctatagatctcgaaacccgtcagaagtttggagtcttagatgttgcgaccaaaagatggttaattaaacctttagccaagaatcacgcatggggcgttattgaaacacatgctaggaagtaccacgttgcacttttggagtatgatgagcatggagtggtaacttgcgacagttggagaagggtggccgtgagttctgagtcaatggtttattctgatatggcaaagctcagaacactgaggagattattaagagatggtgagcctcatgtcagcagtgctaaagtcgtcctagttgacggtgtcccgggttgtggaaagacaaaagagattctctcgaaagtaaattttgaggaagatctaatcttagtaccgggtaagcaggctgctgaaatgataaagaggcgtgctaatgcgtcaggaataattcaagccacaagagataatgttcgtactgttgattcatttataatgaattacggtaaaggaacacgctgtcagttcaaaaggttatttatcgacgaaggtctgatgttgcacactggttgtgtgaattttcttgtttctatgtctctgtgcgaaattgcatatgtttatggagacacacaacaaattccatacatcaacagagtatccggttttccgtaccctgcacattttgcaaaaatagaggttgatgaggtggaaactcgcagaactacgctgcgttgtccagccgacattacccactatcttaacagaaggtacgaaggatatgtcatgtgtacatcgtcggttaaaaagtcagtttctcaggaaatggtgagcggggccgcaatgatcaatcctgtatctaagccattgaatgggaaagttttgactttcactcagtctgataaagaggcgctgctttctcgaggatatacggacgtccatacagtacatgaggtacaaggtgagacatatgcagatgtgtcgttggtcagattgactccgacacctgtatctatcatcgcaggagatagtccgcacgttctcgtagctttgtcaaggcatacccaaacattgaagtattacaccgtagtgatggatcctcttgtaagtataattagggatttagaaaaacttagttcttacttgttagatatgtataaagtagatgcagggacccaacaattacaggtagactccgtgtttaaaggttctaatctttttgttgcagcaccaaagactggagatatctcagatatgcaattttactatgataagtgtctcccaggtaatagcaccatgttaaataactatgatgctgttaccatgaggttgactgacatttctcttaatgtcaaagattgcatattggatttctctaagtctgtggctgcaccgaaggatccgatcaaaccactgattccgatggtacgaacggcggcagaaatgccacgccagactggactattggaaaatttggtggcgatgatcaaaagaaactttaattcaccggagttatcaggaataatcgacattgagaatactgcatctttagtagtagataaattttttgatagttacttgcttaaagaaaaaagaaaaccaaataaaaatgtttctttattttgtagagagtctctcaatagatggttagagaagcaggagcaagtgaccattggtcagcttgcagattttgattttgtggatcttcctgccgttgatcagtacaggcatatgattaaagcgcaacctaagcagaagctggatacatcaattcaaagcgaatatccggccttgcagacgattgtgtatcattcgaaaaagatcaacgcaatcttcggtcctttgttcagtgagctcacaaggcaaatgctcgaaagcatagactcaagtaagtttttgttctttacaaggaagacgccagctcaaattgaggatttcttcggagatctcgatagccatgtccctatggatatcttggagttggatatttcgaagtatgacaaatctcagaacgagttccactgtgcagtagagtatgaaatatggagaagacttggattagaagattttctgggagaagtttggaaacaaggccacaggaaaactactcttaaagattacacagctggtattaaaacgtgtttatggtaccagagaaagagtggggacgttacaacattcatcggtaatacggtgattattgctgcttgtttagcttccatgttgcccatggagaaaataatcaaaggtgcattttgcggagatgacagtttactatacttcccaaaaggttgtgagtttcctgacatacagcatacagccaaccttatgtggaatttcgaggctaagctattcagaaagcagtatggttatttctgtggaaggtacgtgatacatcatgacagagggtgtattgtttattatgaccctttgaagttgatttctaaacttggtgctaaacacatcaaggattgggatcacttagaagagttcagaagatccctttgtgatgttgcaaattcgttgaacaactgtgcgtattacacgcagttggacgacgctgtgagtgaggtccataaaaccgcacccccgggttcgtttgtatataaaagtttagttaaatatctgtccgataaggttctttttagaagtttgtttatagatggctcttgttaa

SEQ ID NO: 1516 - DNA, 10923 bp, Celery latent virus
  source 1..10923: mol_type = other DNA
atgagcaagagaatatatacgattattgttgttttgtgctttcaggtttgctttcaaaatctccgaacacagcctacacaatcttcacataccttctcaacaaatccggcgatccccggtaccgacgctcttcaatttgaagaaaacgcaaacttaacttactctaccataaaatacaatattttaaagtttaatttaaattacaaacaatcaatcatgtctgtggtctctttcgggtcaatcacgagcatggacttcgatgctgcatgtctagcagctatgatcgaaacccctggtggctctattccaccaactccacaatcaccacccacttcaccagtggcggtgaaacaaaggaaaattttaaattttccaattgccaaaatcaggacaactcctgatgcatcttttgagatgtgtgtgaagttccccgagagcttcattgattccttctgtgctcaagcacagaaagaattaaaatattggcacgctgctattacgcagttgaaattctttggtggtgagacaccaaagactcttgaaaccttggtgaaccaaggtcaagctcacactcaccaagttattttaaacttggttaaaatccttgatagtgctccaaaagcaattcaaggaaagaaggagttggaaaatttcttccagctgagcccacatggaaacaattccaaagaaccaattgacgttagtcgaaaggtttatatggaaccgtgcaaaataagtccacgcaagcgacaagtgtgctcctgtgacaatgacgatgatgcacattatcattgttactattgtgatattgtgtgttcaagcaaaaatctattgcaagaacacgaaagggatttttgcgaggatgcacagtcagtgcaagcatttgggtataaacttgagagtccaaatgtctttgacccaccccatgtgacgcagcaaaggagtgttgcaccatctttgggaaaaactttggaatctcctgtgaaatctccagagcagtcaaagccaaacctggagaaaagtttcccactagtggaatcttccaccaacagtggcatgatcttctttggatcaatagctaccatggttccgtctcatattgaaaaatatgtgaggaattgtgaaactgagaatccgattgatgcagctgcatcaaatttggcgatgcaagaagctaaaagctctggcgctccttgtatagtagtgcatcataaggcactaccaggtggaaagaaagattttctttttcctcataactctcctcaagttgtgagaactgaaaccgaagagccaattgctggtaccattgatagaccaacaataaaacgtgctttatttacccgcattaagaagaaagcacaagaaatttgtgtgaacccagggggaaccatccagagaaaaacaaagcgatggttgcggccagcggaagttgcacaaattgtgcgagctacctctgatccacaacatccattgttcaaggtggacgttactcaaattattgaagttgttcatcctgtttataggactgaaagaactgaagttgtgcagcaatgcataacaaggggaacgtacaaattgatgtctaaagcccaacaacggaaggcacgagcaatgcgctcagctggaatgttagtgatcactgataacccaacaacgcattgggtatctgaacctcagaaaatgctagtggtaaaggaaaaactgagcacaacaaagcatgtgaaactccggaatgttgaagtgaatgctgaatctgaaatgttttggggaactaaaacaaaggagggaccctcgaaaacagccttaaagcgctgtaagcgtaacatcgatcgcttggctcttcttgatccgcaaatgggtgagtctgcgaatggtgaatgttggatgaacacctttaagcaccatttaaaagtggggagcattgatattcttccaaataaggttcgtttaccaaaccttaggtcggcattctcacgatggatacctttggttgattatgttgaaattttgaaatttcattgtaagtcacaaccaaagcttaaaagggttgtgatacctactccagttacttatctggaaggttctagatatcacattcatgttggttatagcaagaactgctcatggattacggtcgaacaactaattaggcaattgcagactctgttaacatcatccaaatatggagaacattttaagagagcaattgttggtggtgaaccggaagacaaattcacaccagtggttcctatagttgacgtggaaactgagagagctaaatctagcttggcaaaatggacaactgcgcaacagagatatatgggatctattagaacccgaatcaactcacaagcagaaaaacataaaatcgattcggaaaaaaagatctggataccaatgaggcacgacacgatggatatgttaactccaccatatcttttcgaaaatgggctgagaaacaacgaagttcaacaagtcggccaggttcttggagattctgtagatcgtgctggaaacagttcaggtcagagttctcaatgccaacaacaaaatgtggcgcttgcatccgaaggaaacaacgacaacgtgataaacgagagcgtgcgcagcattcaaaacttagttactgccaatatgcagttgcaagagcaatgcaaattgttgctcgcctcacacgaacaagctatcatggactccgtagaacacggaaacttggagattcagaagcacgatgtagaggtctcgcagaaaccatcaacgaggaaaagcgactcacagaggaatttgcaaaaattctcattgaagaaaatagtcgcctcagaagagatgtcgagaacattgggcagaggatggagaaaatctgtcacctcaatcggtgttccaattgtgagtgcttccattgcagaagctttaaatcaagtcgttcaaaggggaaatacttcctggcttgatgtaggcatttctggaacattgttgaagcaatgtactctttttgctacgagaacttttcaagcgtattgtagctacaaattagcacgaaacgtgctgacattaaccgtgggagaattgtatgataatgtgaaatcatacatcaactctataatgggttccacagatcctgaagtgactggtttcttgtcgcaagtacgtagcgcaccttcaatggtgaagatggccattttgctcacaatgtttgctatctcggtgaaattaatgagaaaattcttcaaggtgaagaataatggaactagctttactgtaagcggagagaatgtctctgcaagccagttgcgaatctcagcacaggctcaagctcgatcaactgacaacatgaccccaactgtaaagaagctttgtagcattcttggaatgattggtttggtttgttgttgttacgatagaacaacatgggcatatcaaaaggattggatggatgcttggatcacaagtatcacatatgccggtgcatctgatagtatttgggaatcaatttcccatccatttgaaacattgcataacattgcagtgagtggaggagatcgttcaccagaaactacagctcgtttggagcgaattttggctggtgcagggttgaacgcacaagcccaagcacttgatgaatttggagcgtctagctcagtgatgggtcagacactgcaaaacatattggatgaggttgaaagtacaaatgtgtcaatcgttagtgaaatgaaagcattgccacactaccaccgaaatgccactaccttcaatcaagcggctcgtgatttagtgactgaaccagatgcaacatatcaaatgttgttaacagcagcaactggtactggaaaatcaacgcttttcccagtgcacctaaggtcacaatctcaaaagagagtcttgctgctcattcctctcgttgcagcaacacatggagtttaccagcgacttaaaagtcaaagggtgaatgatattggttaccatgctgattcaatatctgaaaacccaaatgctaaattaatcatctcaacatatggacacatgtgtgtgaaattacttggtggtcaaaacccttttgatcaatttgattatattttagctgatgaatgtcatgttgtaacactcgagactgttacagtgatatcccatttactccaacagcgagaaatggcgacgtggaaaacagttttcatgacagcaacaccattcaacaatatcacacttaatagtgttgagacagaacagcctgtaatcatgcaacagaccgagcatttccacaaccccaaaagctttgtagattttctaaaagctggcggcactgaaagagtgcaaacatatgctaagggaggctgcatcgtattctgttctacccaaaaagaaactgaggaatcagcgaaagctcttaaagcgagtggggttattgcactcttttaccatgcctctaaccgattggaatgggattcctttgcaaagaaaaatgagcgaagcatgggacaattaaatttttatctctttgctacaaatgcactagaatctggtgtgacgatccctatgaaaagttgcgttgattttgtaactaaaatgcatccagtagttggtggagataggaagactattactatggctccaacttcaattagcattcaagagcaattgcagcgtcgaggtcgagttggacgaacttgtccaggtgggtatctatacacatcagttggaaccccgttgatgtataaacttgacccagattcatccattaagtacttgttgtactgttggaagagtggtatcaaatgttataaggaagcattaaatattcctgatgaatgcacgataacattcactaaagagaaaattggtgctatttggacacatgacacaccgccagttgttacagcagccttagtggataattttggtgcagtttacaggaatgcaaacttcttcttagcatcacatcgaagaaattatgtggaaattccacatacaactgatatgattctgccctcaactctctcgacatgggagaattttgaattggatgggaatgaagtatcagatggcacacgaatgagagtaccacaaaatcatttctttttccgaaacgaaagggtccaagagagttggttgaaattgcaagctgcaattcttactgaactaactgaagcagaagccactaagaagcgagatatagttatcgagaatctgatggcgcgtcgagtatcgggccatcctgcttcgaagcttgaaatagctagaatgataatggccaaacaacaagtggtacaacaagcaagagacacgaaacgtgttcgagaaacccttagtgagagtatatctgattactccggcatcttctcaaacttttctggaatattttcagttcaagaaagattgaaaaaggcttctatcaaggctaatgaggaattagatatggttattcaggaaaatgaatcccatattttatttctacaagacatgataaaagaaactcctgagatcatccctgatatggctttagaggagcagatccaacatatggaatatgcaaaagccatattggaaaatggttggatcagtgggaatcctcaagcaaagcttctcattatgcgcacaacgcataaaaattttcatgatcttgttacaaaaaccaaggatgggacctatcgcatgaaatcatatgtgcaacgcatgttcgattttgtgaagaaacatccattgttaatttttatgtccattatgatgggaacgtcattagcagcaggatacttcatgatgagtaaagactctgaagatgacgatgcaatagtgcaggacaaggttttcaaacgcaatgataaggcaatgctggaatggtgcttgagaggcaaagcatgtaaatgtgacgccacacacttcgaggcacagtatgtacttgattcacgtcattatagaactattctcgaagattgggtaaagttcccattgcgagggttccacaatatacaaatagtaaactatggcacagtgagcaaatatgcacgtgctctagctttcctatcagtttgtgcactcttagctaacccgactatggtgtataatagcgcagcacattccatggctggaaatagtgagtataatgagtcagtagcaaaatccctaatgcacaatattctaagagattggaatagagtcccgctcatagacttattggtaaaagggatagatggaagtgatgatcgttatgatcagtacatacatgaattatatacaagtggaggcctaattgcatttgaatcagacactggaaagtttgaaggaaaaatgtctattagtcaatatcgaaaggatgctgctaaaggacaaacaaaacgtagtgcagcttcacggtcacgtgaagaagatcattatgatccgagatcatcaggtcgactcaagagtgggatcagacgagcatatcgtcaattctataatattgaagattctgatgtgcaggaaattatcctcacaaacaagaaaggagctccaattcttaaaattgggagtcttgatgaattgaaccaacatgttgatcttctaaaattctcagatccagaattgtatgagttgtatttacatgctcgagataaattggatcttgacgaacctgaaagttcaagcggcttcactggaaagtggggtgactatgcggaagatgatgaattcatgaagatgatatcagctttagattcgttaacaaaacaagcttcggaggaagcatttataccagttcaagtgaaacttcgagatgggcgaactgtccaggcaaatgtcgcacgttattggcaaaaagattatccaactggaaaatctgtgaagcaatgggctcaaactacttgggctccaccacaattcacagctcttcgagaaagggtaggaaaagctcttgaactgattcctgaatcgcgaccaattcatcttcatggaaaagtcccaaatggaacacttatagagttccaagatgcaatgaaagatctgcacgagaagacagcagtcaaggctgtagctgaggctaaaatcggagatactcaatttgaggcggatccttctgatgtaacaagccgggttggtgtggttatggtgaaaacatcagcaaacgctgaatgggaatcatggaaccaatgtgttgctttgaataacatagtgatttttccccatcattacacgcttaaagatggtaataatttgagattcaagttttcatcaagtgatttcgaaagcacctgtcacattgtggatgggtacaatgggcttgacatggcttgggctccaattaacgttaaaattcgtggtttgaagaagaaagtttgtttaggcacgccgcggaatggatcttacctatggcatttttccatgattaatcaagggaaagatttgccagaggctcgtcttatgggatactcctctgtaacgaaagtacaagaagagtcgcacccatccttcgattggacacatacagtctcaacgcaagttgggaactgtggtggaccctttgttgataaacatggtgtcattgttggatatcacactggagcttttcaattgggacaatttaatactttcctgggattatcagcaccactaattgcacatctgacaaaattggatgtcaaaccaagtgcccagccccaatcaaagatgatttggagggaagtggatttttatcgatcaccaaattacttacccccaaccattaataaccaagagccaattccagaggagtggagatatccagaaggtaaatctgtttacccatgtgttgatccaggatggatgggttctcgtttggtgaagggatcaggttttcgtctcattggaaaaatgcaacgtcatgtggaatattcaacgaagatttcccttaatgagcattttgacatgtggatgtctcaagagaaaactcaaaatgagttaactaggctgaacaaaaatcgtgtagagaaagggttagagaaagctttcatcagtcacacgatagcagctcagaacaaggaagctgcaattaaagatacgagcaagtatgctagaacaacgttgggaacatattcagaacctttgttgaaaagagcgactgctctgacaatccaaatgctcgaggagcatattaagctatgtaaacgccaaccactggatttagtctatggggatatggaatggaacacagcatgtggagcccagtacaatggattgaaatcagcatttagggatcaagttgttggcatcgagaatatggatgcttatggtcaatactgctgggagcgtttcaacgttccaaccgatcaatacaaaccatgcatttggacaaattcattgaaggatgagttacgaccaattgaaaaagtgaaggagaataaaacgcgcactttcactgcagctccaatcgagtttgtaattggtgctaaacaagctgttgatgcattcaatcatcaattcatggatgcacatttgaagctaccacataccgttggtattaaccaatggtcagggggttggcacaaactatacaagaagttgtatggtaaaaactttgtgtactcaagtggagatggaagccggtttgactcaagtccgtgtttctatatgttcgatgccttgtacacaatacgtacatattttgcagatcctgaaatacaccaggttctggagaatatctacttggaggtttgtcacactccaatagtgttacacgatgggaatgttgtgatgaagaatcatggaaacaatagtggacaatgttctactgttgttgacaatagtctcattatgatgattctatgttgcgcctcttatctagagcacactccagctaccatgcattccctcgatgcaataaaaagccattggcatttttgtgtgaatggagatgattatattggaggaatgtcaccattgttagcaagccatttgactaaagagaagatggcaaaaaccttcagtgacttccagttcatatatgagtggtctgattattcaccatcattatttgaacaagattatatgagtttaaaattcataaacattgttgaacgaaaaggacaaacaactggacaacagttaattgctccatggcgtgaagcatcacgacaactctccactttggctcacacatcaagtggtgcacctgaaatcaaattacaagttgctctaaccgagagggtgaaagcatgggttgataaagatttatttgatttcataacagaatactgcagatggctcgtggagtatttcgatagatttacgaacacgcaagcatggaatgaagctaagaagttatggtgggatgaacaacaaattttcaaccattatttcagttttgaaagcatttgcaatgcgccatactcacaaattgtaaacgaaactcctgatgagttctttgctaatggtgtgagagagtcccgaccattgcgaatcctacgcgatggcatcaaatttggtgttgctgttacagcagctaattatctgggaccaagcgatcacgatgtacccatgattgcaaacacaatgcttaatgttgccaagataggtctcgcaaattcaacagccgagcggattgaccgtatgctatttgggaaggaaaaccctgaacatagtagagcggattcgctagttgttgtaaaaacagagcaaacagatgcgacgatctgtttgcgaactcactgcaaatgccaagcacagcacttcgatgggaaatatgagtgttgggtgagttccccatctgttgctataaaaatgtttgcaacattaaagccccggattctttccacaacgaaatttgttggagttaagtttctaccaaaaatactaagagctcatgtatgggccttatacctatctggattctcttgggaagaaacaatgcaaattgtgcaaagtcactaccctggcgagaaacagcaaagaaaagcggattggttcctacagcaactgctgaaagagctagtattgatattcaaagtgaaagggtcgaagtttattgagttgggagagcatgctcaagttcaagggaaaactcaactcgactctacacaagttgatatggatccaaattttaatgctgcagcttatgctgcaactcttcgaggaggaccgcactggggtacacataattcccaaggtctgtttgatgctattaaggtattaaaccccaatgcagcaaatgttgacattgggaatgcgcgaactgcggttcagcgcgagatgcagcggttgatagctgccgatgctccgcgacaacaaccaccaccacaagttggtggaggacaccaacaaccacctccagctggaggtcaaacgcaaggccagcctggtggttacacaccgagccaggcatttaccaataaatttggtaatataatggctgagcccgatgcccccctcgtgctcgactctcaagcaacaatgagggaagttgcccaaattgaggcagcttgggctcgtcttctagaggtgcaatctctagagggtcttggttccttctggaactacatgttttcctatgtgggaaacaatggcacctcatctggaggtgatcccagggattacatccctgcaggaaatgggcgagttacacttgcccaactaaagtccaaagctcaaggtgagcaatggcgacgttattggcgtagtcatgcgtcagacatgagggatttcttgaggcttcttcaagcttcagatagacctttgcctattcgttgggcaagaaacaatggcattaaagatgccaattacgagattgcattcgattttgcggatgcactcccagatctctcagctgcacaaatgtcaattattttagcagctaagaaccttgccgtaaggcgaggtcaaggccagatgcttaatgctggcaccaaggttggaggtcggtcaagaaccgaaacctatgaccaggctgtccgcgatgctgcggatgtccaattcccaggagcataa

SEQ ID NO: 1517 - DNA, 6096 bp, Black grass varicosavirus-like virus
  source 1..6096: mol_type = other DNA
atggatactctggagcacgctgaagccaatgagctagaagacgatgattactttcttcctgacgaaggacctcttcatgatatgcacttggctagtgcaatcaacttggatcagatacaggagttgatgtatccagggactataaagtacaagatagatattccctattatttaagggatgagtacatgctgatagaaagtttgtgcaaaggagacaagatcaaaatggagcttggaatgttggctccatctttgaaactgtccaagcctggaggagaattgtcaaccatggatttacctgcatataaagaaataggaaaccttgtctgtcaggctttgaggaatagggacatcatgattcctatctccatgaatgatgtggcgctgaagctcccaggagtaatagtctacaggtcatggggtatagcatttgcagaattgttgaagattatatgcacaagagcagaagtgatgaggggagggtctcagcctgtatatcaaggcactggaattgaagcaggtgcagcacattgtcagtttcaagtcaacggcaattggtaccagatcgttgcgaggaagaatctctcaacactatatgacaggcaagagaatgtaatgtatataggaaatatacactcattgcttttgctaatggataccatcggacagaggatttgtttaatggttgccaatcagatagcagaactttatgatacacctggatgggttgatcaaggaaaaattgaccaaatattatcaactggagatgacattctggaagaaatgggaaatgatggatatgaaacaattgctatgtttgaatctcttgttataggaaaggtgttgagagcaactcccgatgacatcacagaatgccataagtttttgtacaactgtatggatgaggtagaaaacatgctactaaactctgctatgagaggaagaatcattgaacttgttcacagatggttggccatatttgacagtttatcgatcaaagagttatcaaatgtcttttgcttatatcgatgttggggacacccggttgtaaatatctatgaagggatggagaaagtttacgacatcggcactgaagagaaagaagttagcccatgggtagcaactgacatattgtgtcagttcagaaaaactttcttgataaattattacgagaagcatcactactatccaaacgtcttgatatcagaagaggtagaaaactcatatgttgctcaatgcattaagaagggttcttcaatagaggagatgtatcctacttatgatactaaggacttcttgggaatcgaaatccagaagatatgggacattccaataacatttgacctttgtcacattcttaatgataaagcagtatctccgaaccagaaggagctaacagacagtgttgtcaggtaccaaaacactacaggaggtcagaacagaagagggctccttagatggttgagaggaaagagcttaaactgcagagagttccttcgggagatagatcagaacgggctccctgaggatgagtgtatcattggaatgtacgagaaagagagagaaatcaagatcaaagccagaatgttttctctgatgtcagaaaggatgagatattacttcgttttgacggaagaccttatagctaagcacgtgctggagctatttcccgcaataacaatgaaagattcacaaaatgtactccaaaagaaattttggaccgttggcggaatgggaaaagactccacattcgacgttaatatcaacatcgatttttcgaagtggaattcgaacatgaggaatgaattaactcaacccatgttccaacagttggataagatcttcggatataccaatttgatatcaaggacccacgagatatttgaatcatcgtttgtatattcatcttcaggcaagtatgttcccactgtaaagtttggaaaactccaagaggatcctcctatggcatatcgtggacataagggaggctttgaagggttgagacaaaaaggatggactgtagctacagtatgtgccttatctgcaattgctgagagaagaaatgtgagaacaaaactgatgggacaaggagacaaccagatagttagaatactgatgcccacccagagatggaaatcaaatgagcttactatcaaagaaatgatccaaaatgccaaacagatccaaaaagcctttgtaaccgatatggagagaacatttgaagaggctaaattgcctatcaaggtgagagagacttgggcttctacgagactatttatgtatggaaagatgatcctacatgacggagatgcgatgccccaatggttcaaaaaagtgctgaggtcatacgctctaaccaatgagggtcaagtcactgtagcaggggtggtaggaactattgctactaacatggcttcagcggcaggattgagtgaaatgcctgatgtcatgtatctcatatttgtagcaatgactgagtggtcgctcggttacttgttagagtaccacccattcacacggaaatgcatcctaagagaacatgagtaccatgtaaagatccccggagcacatagaggaagagattatagggtgaggtcagttaacaagagaagattggtagtttctatgatcctgataccaacggcagctggaggaagtgtaacagttcctctccctggattcattatgaggggattccctgatcacgcctcagaggcttatgcctggatcaagatgcttgcggaagtaaagagtccatacaaaacaatgttaaagaactggtacactttcatcgggaatgattctatccaacctgatatgttgatccagagcccgtcatcaatcaacttcttgaagccgccaacacccagctttcaagggagaatgaacgtaagagagctcttattgtctggagaatttgatcagaaccagttcatcaaagaagcaggaacaatattgggagtctttgacaggaagaaggtctgctctgcgatgttaacagacccaatgaaccctttcataacctcagaggtttattccacttatgcccatgtgtacatagacggagtgataaaaagagtagaaaacaccagtactatcaagaagttggcccaaaaggtgaaaaccaagactcaagtcattaaggcaatgatgtacaatgaacataacttcatcatgttcataagttggagagcaatgaaaagaggtaccatcgactatgattgtgcaacccagcaagctagaatggctaggaatattggttggggaagaacaattactggtgtgaccacacctcatccagtagaattggggattggtcatatatgtaaaggtagacaagatgaatgtcctccaacggattacatttatgtcagaataaatgaaaagggagaatttgtcccttatcttgggtcaagaatcaagtgtaaagtcgtatcagagcaagatatagatgccagaagagagccactgattgctgtgggttcgcgtatatgcaggtactcgtcgtggcttggaattggcccaaatctgatggaaattgttgagaaaaacctagctgttgtctgtgacacatctgtctatgacaaatttatagacgatgatccaaagggactgttgtcatcaggatctattgatcatagattcactccagcaggagcatctgagggagttttcatcaactatgcaccacagattggttgtaatgtgtacatgtcgagcgattgtatgccgacctatggaagaggccagaccaactacactttgcacttccaggctctatattgttggctgcaatacatctcatcaaggagggctgaaagtgtattcatgcatcatcacatagagtgtgaagattgtgtcgtaccaactactgatgaagtccccgacatccagtgcccctttccctatttcgataatatatatcccccaagagtaagggacagcatatcaagagccttgggattcattgataggaaaggaggactagatattatgagcaatgtaagatcattgtgtcatgaagctgaaccaggcatgtttgatgttagacaattgcaaaagggagtgatgtggacactagcaataaagatcggatttcgattgtaccatgggggattattcgggtcagatgataccagagttgaggaccttcaggagtatcccaggatttactcatataaattatacagagataccttactggtcaatgtggcacatgtgatgatgatgcttgcagccatagagatggataaggcacctgatggtgaggaactcgcaaaagtcagaagaagagcaactgataaactgttgtcgaaacccattggaagcttcaaggggttaggaggattaactctaggaaggactgatgagaatccagataacagtcatttgtttatgactggctcattcccagaaactgtattctcaatattgaatacttccaagactgcattaatagagacaattggtcagattggacgcttatccatcgaaggaatgggccatcttcctgtggccaaaggttctctgtccaataagcagtttcgatttctgataatgatgagatgtttgttagaatgcaggaactctcattactttcaacactttcagaagatcccagaggacgaaccaggacatccagcggaccctcaaaatgacgtttatagaatgcttgtcaaaactcccgttctagatatgagtctagacaagatggtcaaatcacttgctgttattaacgaaagaaagactcttccgataatcgaatggaataacatctccttcgaatcaacagaagtgatctgcaggacaggaactcccaggtccatattcatcggaaatagaatgatcgttgagcaaaatagtagaagagagtacagagaagtaactcttccaacatctagcatttacaagtgggctgggatcttgtttcacaaacccttgaaaagacatatcattgtgttgggagatggaacaggaggaacctcactgttggtgaaaacattcaatcaagactctacagtgtacccttgctcctatttagaaacccataagattattccccaagatatggaatgtttaatgcctcaattgtctagaggatatgagggaatctccgggcgagttttgttaaatgttccagatgatatcaaggatcctctctggtcagaaagaatgtctagtgagataaatgacatgggcgttgaaaggacctctatagtctgcgatatagagaccgttgggctatgtgttctccttgatgcattcaggagtttacctcaaggagttcaagtagttatgaaaacctatgccaaagatatattgactaatatcatgtcaataatgggcttgaatcaggtagaggtgggattttctccgcatctgaaccagagcaaccatgaagtgtttctaatgggacacatctcacagaattcttttccagatcctgacatgatgatcaatcaaatggtaaagctttatggtaaggtgagagctgatccaagatccagaatcctggaggaaatgaggatgataaacaaagtattcaagccattaaagaatacgtctgtgtctctatctctagctcatataaataatctgggaattactatgaccagggagatattacaactggatggacttgagatctggggatatgcactgcaatttgtaaatcgtcattatgttgacccatctcatagagcatttcttgctgacaagaaaacgatgaacaggaaaagaaagagagatttgacaagggcattcaggatattgctaggagtggttgtgaatccaggatacctggatataaaacgcaaatggggtattagaactcccaaggaattcaaaccaagaggaatgaaccttatactagccagagattgtgatgatatgggtgtcaaattaaccaagaaggacaaattggcctctgaatgccttcattgcttttggaccaggaagatgaggaaagctcctctagatgcaccagatccaccgggggaagattggatggaaagtgcaacaagagttcgatcatttgccagcagtttatctgagcactcttctcatgattacatcaatgtcattgagacagagtag

SEQ ID NO: 1518 - DNA, 7017 bp, Maize suscal virus
  source 1..7017: mol_type = genomic DNA
atggagacctttctagatgaacaatttgatgatatgctatctgaatttgagcaagcacggctgtctcggtttccagcctcacatcacagctcggctttaacatattatcctcaacgccatattctgtcattaatgtctccaaactgtcctgtgaaaccaactccccttctgcgggcatactgtgatgcggtcaataaagtatctgatctcttggggggtgggtgtgatgccacagacaacccagctccagtatactcttatatcttctctcagacaacggcttcttcgccagcctattatgacccagactatgaggatccatacctgctggattccctgcgagcagcctcagatgctgtgcttgaagatattgaagctatagaatctcatcatccgggtttttcgctggataaccagaagttgcgactgctgcggaaagtctcttcacgtctccatgcttcctgcaaacagatatttgcggtgcgaagaatgttagaaaaagttagaaatcaaatccagaaatgtcacatcggggttgatcacaagcttatgccagcagtgagattaggaaatttgagtatacacactgttagagatctcatcttcgtagccggactgcaaccattccccatgcgcatccatatactaaattacgatcagtggctaatgatctacgacacagtctgttgccgtgcaatggtaaaggtggcaactttatggaacgaggaattacgcactgacaatatcccttcatgggagatcgtgtcctcagtttataaatggggcgacgcacttttaaccaactatggtgtctcagcgtatgctattataggagaatttgaatcaatagtgactggtgtcttaattacgttttctgacactgacacactaggacttggtgcctcatttgtcaactcaataatggagaacgcgcaagagcaaagcagagcttataatatacctgcgaatgagacattgaagctgatatcattgcttagaactgttgagtctgtgaactggctgtcagagttgttcggtttgagaaagcattggggaaatccaatggtggacgcgcgagcatcgggaaaagcagttcaggagaaggtagatgaggtattgccagttaaagggactgcacttgtgaaattattggcatctttcaacaggatggttacactgtcattcatctctcagcatgggcaatggccggacggttactacctctcgaactcaagagactgcccgctgaaaagagccttcgaatcacggtctacccgtatcccagagactgtggaagggcatcgtcatgaagactgggcatgctttgtgtttctacccaactgcattttagactcatatgaagatgacctggcattaatatcagataaagctgtcagtgtgtaccgcgaacacttagattcagtctatgtgcgggctctctgtaataagcagagtcagggcacggttgaggaagacagaaggttgatgttagagtacttgaggaaacagcatatgccaatactggatattttcaaaatagtaatgacagacgcagtgccgccccgatggatggccaactgtgctagcatgaaaggaacagaaatgaagcacttgaaggcccgaatttttgcggtgcttacatatgagatgagacagtactttgctgcgtcagaagacatactgaagaacaacttatttaagtataacccgcatcagactatgactatgtcagaaacagagctattgactcgactaaaatcattaactactcaattggatccaaacagtcaaagccggcagctgagtgtaatccatattgttgatttttcgaaatggaatttgagaatgagatacactaatacatgcttggtattcaaatctatagacgatttcttaggaactccaggcttgtttgagaattctcatccactcttcagtgatatgctcaacatggtttcagacccattcaatcctccagcgttaggagtagaagagacagaatctgacactatttggagaaatcatcacgcggggtgggagggtcagcgtcagaagggatggacaatcttaacatctgcactcttgtctgacctggagagaacaaccggagttcatagtgaaatatgcggccaaggtgataaccaggcactactaagcaaatttcctgtccccactatctataggaatccggaagaatggatcaagagtgatcctacggaggttaggaaggtgcttgacgacttctatttgagattagaaaaggaatgtgaagctgtaggtctgaagataaaaacagctgagacctgtcgaagtctttgttttttcaactacgggaaaagactctatttcaaaggcagtgaactatccatgaccctaaaacggttctcaaaaaacataacccagcctaatgactcatacccaacaacagaggctattcttaagacatatgagggttcatcttatgcagctggcctttatagccatccaagtctgctgccatactggatgagtaaattctctgtagcccatcaattattcaacagcttcactaacaaccagctttgtgcagaagccccagtacagatgatgtccacctttgggttcccgatcaactaccgactgatcagcacgttgatgaagatcccagcatctctaggtggcccacctcagcagtgtctggctgattatctgctacgcggccatccagatccactatgcactgatttagtcgggttgacattgaagtcaaaggccgggtgtgtgatctctaagaagataattcgtctagctcaatctggtaaatggtttagccaacgcactctgaccagagattccctaatcaaatctccttattctctgaacctcagggtcccattatcagttcgacaaccaattgaagaggctgtgctcccggctgtgcgagctcactgcaacaataacttagtgaaatctctatttgatagctcgatggatgacgacgagagatatattcttgactctttaggtcttatgaagccgttccatccgctcgtggccaacgatatttattcaaggactttaccaggaagaagacagatgtttatatcaggactggcgaataccacgagcttaggtcgcctgattaaagggaattctgcgtttcctctgatctacaaagtcatggatttggagatggagcagctaaaaagctggatagtccagctaacagagcttctcggtttacctgataatgatgatattattcttcctcatcatatattagcgcaacagctgcgcgagaaatcgtggaatacagtcattgagggcataacagttccacatccgttagaacagttcatgcttactctatcaaaatcggacgtctgcaccaacgactgttatacagtagaacctgagcatattgtattggttcaacactccgaggatgtggttgtgtctcccggtgtggaccgtgaccacatcacagcagcgcggtcaaagaaagggagcccctatcttggcagccatatcggagaaggcattgtacagaagcagcttatttgtctaaatccagatacttcctggagagatgtcattagactaaacactatcaagcgttgggtggctccagaggggtctaggctgaggttgtttatgaatggaattataagctcgcggactaacatatctcgtgcctacatagatctcgccacaggcgttccgagtagattgtcttacaaccaccgggccagcctgatggggtcaataaacagctgctctatcagttcgaccacaaacatgcacacaaggttgtacttatcctcgaacagaatgggagattattctcatggtttgaaaaattatcacatgcctttcgggcccacctttctctgttatcagacgctcgtctgcttgatcgggatcttttcacctgagaaatgggcattccctagaaatgtttatcatattcatgtcagagactctagggtgccgccggtgtacgatggcgggttagagctagaagacctaactgtccttgatctgaaaggacacccgcctaccatccttaggtgcttagcctccaaactggtattcgaagcagcaccaggatatgcatcgttcggattttggtgtgagttcgaaacagcatcgaggactgatgcgaaatatgggtatgcccaacagctgacgggtggtttgttcattcaggagacggttgtaagagaatctataacacacgacaggattgggagctttgcatcgagaccggctgtcatatcaattggagacatctcattgatcgagccatctctattccttcgttccatcgcctggggtatgctgttgctcgcacctatgcatctgctgcatttcagaggcaaatatgcattcaaagtttcctgcgtggaatatgtcaatcttttcagccgagctttttggtcttcatttgaatccccaatgagcaacccccgaataattaggaagctcggaaagcatgtcgcgttgatgtctagtcatagtctaggtaggctagattccggcatcatcccagctctgcagataataatcgttgaagagatgtggtgtatcatacattcgatcgccacctatttccgtcgaggaggtgataaaccgaatatcccccccatctttgccccatcgggttctgctgccctactcctcacctcacgagtgatagaaatgatggtcactatacggctagtagttgggaactgcagcatcagtaagatagtagggttcccaagagatttctcggcaaatcttatgagtgtgccgcagccaatatctgccgcagctctgatcgtgatacaacatgacttcttagaattgcagcgtcacttgaaactgccattacgggacatggtgatacccagagtgttctcaacccattacccctgggttgatatcttaaggaagactgacagtgtggaggcagacgatgaagacccgcagaggcaattagtcctcccagtcgactttccgcagtgtgctaatgtagtagaatttcgtatccctgagaaccctgtgttggagactactccacaatgtgactgtaaaacgacacaaagaaagagagatttacatgatgaatgtttcttttcgctgagtgggaactatagcaaatcccacctcaaaattctggagttgatcttttcgttccacctgcctatagcaaatctctgcgtgcttggctctggcactggttctgaagcatgtgcgttaagtaattatctggactgcagacaggtttatgtgaattgctaccacaaactaactgacttctccccgcatgctgcttccacttatgttccgcctgcattcaggtctgatggtatagtgactaagctcgtctctccagcctctgctgtcctaagtctgtcagatctcacggacatcaggactgcggatgctatatatcagcacttaagaggtattgctacaactggtatcatttgcgatgcagagattccaagtgcagcaactcctttactctactcacagataatgcatacaatagtggcagttgtgaggaagaaagcctctatcaactgggtgttaatcaaagtgccgatcttctgtgttcataagcttcttggcctggcagctccactagctcaggccttccatagaatcatctttgcttatccagacttcgggaagcctcattcaagtttggtctatattgtcgctactattcgggctaaggcaactccaattgaagagaataggctgcctactgtaatgcttgaagacgagatgctcagagagatgttggcctctatcagcagtcagaaccattgtagattatatgagatgagggtagcggatagaataagtcggttaagccttaatctaacccttcctcaaagcttgactgtggcttcgaatcggtttgtgcaaggcctgatcctcactgaagacgaaatctccgacccggaacaagttataaaggtactgaaggctgtgaggcaagggttgttgacctcagcacagaaagtagttgaaactcatttccgagttcataatgaaatcacaatgccgaggtcagctgtcctctctgcggatttaggaacccttcacggacagttaaacaacacatacctgaaagtcgctaaatgtgatctgctgttagagctgttgcaccttattcatcctaccctcgaacagatcaagaatcgtgtgtacagctggttggctacagcccactcgtatagaatgagaaacaggaacttcaatgtctacatcaaccagaccagatttatatcacatgattctagatatttattcgaaatccttggacatcttatgaaaagatctgttcccacagttggactccccatccatatggattaccatttattcggatctaggacactgaggcctaagcaacttattgttccttgcccaataggcgtatgtcgaagtccatcaggtagaactagcaaatggaagtggcagaaacgaagtgagatacttggttgggcaatctcattaaccctcacaaatttaccgatagcagttgaggatcataatagcttttcgctggatttcctacacgaaaaaggcatcttagaagatgttcgcatgatggcctcattaaacccatcccgcatagaggtcccttacttctttaggcccaatgagatggccctcgatttgttggcgcatgaccggttgttccttgttgcgccgttgaattctttctcactactcagaagccgttacacaaccgttgagccatactttgttccttggtcgggggcccctttagcttggtgtctattttatctggaggagcggaaccaaattgatagcctgattgtggatgagatctgccttgatgatactctgtcggtcaacacttatgtcgacacagacagcatgtcctgtagatgcctgagctgcaaaacggaagaagtcttgggagagaggttttcgttaaataccaacgatctggatttcctgtgttctcttggatctatagagacagtctatgattctgagcatgctttgtag

SEQ ID NO: 1519 - DNA, 2040 bp, Horseradish latent virus
  source 1..2040: mol_type = genomic DNA
atgaaacctcaacctctgaagacgatggaacatctacttcagaagactcagattcagactgagcaggtgatgaacatcaccaacccaaactcgatttacatccgaggaaggctatacttctcaggatacaagatcgtggagctcgactgtttcgtagatacaggagcaagtctgtgtattgcaagcaaacacgtaataccagaagaaagatgggaagcagctcccagaaagatcaacgtgaagatcgccaatgaaagcacgatcacgctcgataagatatgtcgtaacctcgacatcatcattgccggagaacgattccacattgacgtcgtcttccagcaagaaagcggtatcgacttcatcatcggtaataacttctgtcaggagtactctcctttcatacagttcacaggacacattgtgttcacgatgaaagatcaataccaagtaccaatcacgaagctccgacgagctttcaagagaggaattcctggatttttagaatccatgaagaagagatcaacggctcaacaacctgaaccgctcaacatctctacaaataaaaccgtttcactttcaagggggaggaggtttggagaaaaactcagaatcacccaagaaaggatggtaaaaatcgaagaactacttgaaaaagtttgttctgagaacccattggacccagagaagtccaaaggatggatgcaagccagcatcaaactatcggatcccacgaaggttatcaaggttaaacccatgaaatatagcccaatggaccgagaagaatttgagaagcaaattcaagaattactggacctcaaggtaatcaggcccagtaaaagcccacatatggcaccagcgttcttagtcaacaacgaagctgagaaacgcagaggaaagaagcgtatggtggtcaactacaaagcaatgaatgatgcgactgtaggcgacgcatacaatcttcccaacaaggatgaactccttacgctcatcagaggaaagaaaatcttctcttcctttgactgcaaatcaggattctggcaagttaggcttgacgaagaatcaaaatccttaacggcgtttacatgcccacaaggacactatgagtggaacgtggtccccttcggcatgaagcaggcaccatcgatattccaaagacacatggatgaagcattcaaagtgtttaggaagttctgctgcatatacgttgacgacatcctcgtcttcagcgacaacgagcagaatcatcaacttcatgttgcgatgattctccagaaatgctatcaacatggcatcatactttccaagaagaaagcacagctcttcaaagaaagaatcaacttccttggcctggagatagatcaaggaacgcatagacctcaatcgcatatcttggaacacatccaaaagttcccagatatcattgaaagcaagctacagcttcaacgattcctcggagtactaacatacgcctccgactacatcccgaagctagctcaaatccgaaagcctctgcaagccaagctcaaggaaaacgttcaatggagatggactcctgaggacacattatacatgaagaaggttaaaaagaatctcaacggattccctcctcttcatcatccccttccagaagagaagctgattatcgagaccgatgcatcagacaactactggggaggtattctcaaagctattcatatagatttatctactaacgaatctattgaattagtttgcagatatgcatcaggcagcttcaaacctgctgagcaaaattaccatagcaacgataaagaaacgcttgcggtaataagaactattcaaaagttcagtatttatctgacaccggtaagatttctggtaagaacagataatacgcactttaagtatttccttaatattaattataaaggagattctaaaatgggtagaaatatccgatggcaaggttggttgcaaaactatgtctttgatgttgaccacattaaaggcactaacaattgcctcgcagattttttatcaagggaattcaatggagcttag

SEQ ID NO: 1520 - DNA, 1077 bp, Bean latent virus
  source 1..1077: mol_type = genomic DNA
atgccactcccgaaacgctttcgcttaaatgccaagaactacttcctcacatatcctcagtgttccatatccaaagaagaggcattatcacaattacaacgtctaacaactccagttaacaagaagtttatcaagatatgcagagaaacacatgaagatgggcaacctcatctacacgtgcttatccagttcgaagggaaataccaatgttcaaataacagattcttcgacctggtctccacaaccaggtcagcacatttccatccgaacatacagggagctaaatccagctccgatgtcaagtcctacatcgacaaggatggagatacaattgaatggggagagttccaaatcgacggcagatctgctagaggaggtcagcaatctgctaacgacacatacgcgaaggcattaaatgcaggttctgcagaagcggctctgcagataatcaaggaagaacaacctcaacatttcttccttcaatatcataatctggtctcaaacgcaacaaggatattccaaaaacccccggaaccatgggttcctccatttccacaatcgtcgttcaacaacgttccactggatatgcaacaatgggctgacgattatttcggaaggggtgccgctgcgcggacagagagacctattagtatcatcattgaaggtgattcaagaactggaaaaacaatgtgggcacgttcattaggttctcataattacttgagtggacacctggatttcaattcttttgtctattcaaataatgtagattacaacgtcattgatgacgtcgctccacaatacttaaagatgaagcactggaaagagcttatcggggcccaaaagaattggcaaacaaattgcaagtacggaaagccagttcaaattaaaggtggtatcccatcaattgtgctttgcaatccaggagagggggcgagttataaagactacttggatagacaagagaatgcacatctaaaagcgtggacgcttcataatgcgaaattcatcttcctcaactcccccctctatcaaacctcagcaccggtttgcaaaacgcagggcagtccgacgtag

SEQ ID NO: 1521 - DNA, 1065 bp, Rice latent virus 1
  source 1..1065: mol_type = genomic DNA
atggccgatccctccacttcccaccaattcagcgtacggaccaagtacttcttcctcacctatcctaagtgtcctgttgatccttgggaactccttcactatcttcttactctgctccacagtcgtgtacctatctacatacttgttactcgtgagagtcacaaagatggatcctttcacctacacacccttttacagctatctaaccgcctggagaccaaagactctaggttttttgactatcagtcttatcatcctaactgtcagcctgctcagaactgcaagcaggtcagagactacatcaccaagccgggaaccgtcagtattgcagaatggggcgaattctacaacgccaaaccgttcagcaagaagaccctcaagaggagggcccctggatctgacaccaaggacaccaagatgaggaaaatcatctcctcgtccacctcgaaaacagagtacctctctatggtacgccagacattccccttcgactgggcaactaggctggcccagttcgagtacagcgcagagaagctcttccccaccaccgtaactccatacgcaagctctgtccccactgatcagctacgttgcagcgaacagctgagtcagtgggccacagagaacataaagacatacacggtatgtgaagaagatgctccaacaaccgccagaagatatacctccctatatgtatgcggaccaacccgaacaggaaagacaacctgggcaagaagcctcgggaagcacaactattggaacggactggtggacttcaccacttatgaccccaccgcacaatacaatgttatagacgacatcccgttcaagtactgccctaattggaagcagctaatcggatgtcaccgtgactacaccgtcaatcctaagtacggcaagcggaaggtaataagtggtgggatcccctccatcgtcctggtaaatgaagacgaagactggctgagtcaatgtacaccggctcagaccaagtacatcgaaagcaactgcgtgatacattacatgtatgaaggggatagtttcttcaagcacccttcgggtgcttag

SEQ ID NO: 1522 - DNA, 1149 bp, Rice latent virus 2
  source 1..1149: mol_type = genomic DNA
atgaccaacactgaatccgcatctgagcaaccacataactttgccttccagaacaaaaatgtcttcctcacttatccacgatgtagccaagagcctcatacaatgggcttattcctctggaatctgctcaggccttacggcgttttatgtgcttctgagcttcataaagatgggactccccatctccatgctcttgctcagactcgtcatcgcattcgcacacatgactcaagtttttttgataatatggattatcatccaaatatacaaggtacaagaaaccctaaagctgtactggcttatattctcaaacatcctacaggagaatggcataagggctcctttcggccccgaggatcattcggagttcctccgactgggaatggagaggctggaccttctacgacgattaggagagctgctggggattcctccagctcggccgagggaggtaacacctcctccgagctggccaacaagcgacgaagaatgactaaagaccagataatggctgacatcctacgctcggcgacctcaaggatggagtacatgaacggggtcaagaagtggtttccgtacgactactgcgccaggctgcaagcctgggagtatgcttctcagaagctatttcctgatccaccggtaacatatgaaccaccgttcaatgactccatgtttcattgccatgaaacactcacagaatgggctgccgagaacatctaccatgtaaccccgcaggcgagaccaatcagcctctacatctgcggaccatcaaggacaggaaagtctacttgggctagaagcctcggcagacacaattactaccagaataacgtagacttcgggatgtatgatcccgaagctctatataatataatagatgatatacccttcaagttctgtccttgctggaaggccctcgtcggagctcagaaggattacaccgttaatccgaaatacgggaaaaagaagctcatcaaaggaggaatcccttcaattgtcatcgttaacgatgacgacgactggcctaaagcaatgactgctgaacagctctcgtacttcgagagcaactgcatcatatttaatatgagtctatataatttcagctttatatcagacaccggcgcaacagcgccggaaagatgttaa

SEQ ID NO: 1523 - protein, 1615 aa, Tomato brown rugose fruit virus
MAYTQTATTSALLDTVRGNNTLVNDLAKRRLYDTAVDEFNARDRRPKVNFSKVISEEQTLIATRAYPEFQITFYNTQNAVHSLAGGLRSLELEYLMMQIPYGSLTYDIGGNFASHLFKGRAYVHCCMPNLDVRDIMRHEGQKDSIELYLSRLERGNKVVPNFQKEAFDRYAETPDEVVCHSTFQTCTHQQVENTGRVYAIALHSIYDIPADEFGAALLRKNVHVCYAAFHFSENLLLEDSHVNLDEINACFSRDGDKLTFSFASESTLNYCHSYSNILKYVCKTYFPASNREVYMKEFLVTRVNTWFCKFSRIDTFLLYKGVAHKGVNSEQFYSAMEDAWHYKKTLAMCNSERILLEDSSSVNYWFPKMRDMVIVPLFDISLDTSKRTRKEVLVSKDFVFTVLNHIRTYQAKALTYSNVLSFVESIRSRVIINGVTARSEWDVDKSLLQSLSMTFFLHTKLAVLKDELLISKFSLGPKSVSQHVWDEISLAFGNAFPSIKERLLNRKLIKVSGDALEIRVPDLYVTFHDRLVTEYKTSVDMPVLDIRKRMEETEVMYNALSELSVLKESDKFDVDVFSRMCQTLEVDPMTAAKVIVAVMSNESGLTLTFEQPTEANVALALKDSEKASEGALVVTSRDVEEPSMKGSMARGELQLAGLSGDQPESSYTRNEEIESLEQFHMATASSLIRKQMSSIVYTGPIKVQQMKNFIDSLVASLSAAVSNLVKILKDTAAIDLETRQKFGVLDVATKRWLIKPLAKNHAWGVIETHARKYHVALLEYDEHGVVTCDSWRRVAVSSESMVYSDMAKLRTLRRLLRDGEPHVSSAKVVLVDGVPGCGKTKEILSKVNFEEDLILVPGKQAAEMIKRRANASGIIQATRDNVRTVDSFIMNYGKGTRCQFKRLFIDEGLMLHTGCVNFLVSMSLCEIAYVYGDTQQIPYINRVSGFPYPAHFAKIEVDEVETRRTTLRCPADITHYLNRRYEGYVMCTSSVKKSVSQEMVSGAAMINPVSKPLNGKVLTFTQSDKEALLSRGYTDVHTVHEVQGETYADVSLVRLTPTPVSIIAGDSPHVLVALSRHTQTLKYYTVVMDPLVSIIRDLEKLSSYLLDMYKVDAGTQXQLQVDSVFKGSNLFVAAPKTGDISDMQFYYDKCLPGNSTMLNNYDAVTMRLTDISLNVKDCILDFSKSVAAPKDPIKPLIPMVRTAAEMPRQTGLLENLVAMIKRNFNSPELSGIIDIENTASLVVDKFFDSYLLKEKRKPNKNVSLFCRESLNRWLEKQEQVTIGQLADFDFVDLPAVDQYRHMIKAQPKQKLDTSIQSEYPALQTIVYHSKKINAIFGPLFSELTRQMLESIDSSKFLFFTRKTPAQIEDFFGDLDSHVPMDILELDISKYDKSQNEFHCAVEYEIWRRLGLEDFLGEVWKQGHRKTTLKDYTAGIKTCLWYQRKSGDVTTFIGNTVIIAACLASMLPMEKIIKGAFCGDDSLLYFPKGCEFPDIQHTANLMWNFEAKLFRKQYGYFCGRYVIHHDRGCIVYYDPLKLISKLGAKHIKDWDHLEEFRRSLCDVANSLNNCAYYTQLDDAVSEVHKTAPPGSFVYKSLVKYLSDKVLFRSLFIDGSC

SEQ ID NO: 1524 - protein, 3640 aa, Celery latent virus
MSKRIYTIIVVLCFQVCFQNLRTQPTQSSHTFSTNPAIPGTDALQFEENANLTYSTIKYNILKFNLNYKQSIMSVVSFGSITSMDFDAACLAAMIETPGGSIPPTPQSPPTSPVAVKQRKILNFPIAKIRTTPDASFEMCVKFPESFIDSFCAQAQKELKYWHAAITQLKFFGGETPKTLETLVNQGQAHTHQVILNLVKILDSAPKAIQGKKELENFFQLSPHGNNSKEPIDVSRKVYMEPCKISPRKRQVCSCDNDDDAHYHCYYCDIVCSSKNLLQEHERDFCEDAQSVQAFGYKLESPNVFDPPHVTQQRSVAPSLGKTLESPVKSPEQSKPNLEKSFPLVESSTNSGMIFFGSIATMVPSHIEKYVRNCETENPIDAAASNLAMQEAKSSGAPCIVVHHKALPGGKKDFLFPHNSPQVVRTETEEPIAGTIDRPTIKRALFTRIKKKAQEICVNPGGTIQRKTKRWLRPAEVAQIVRATSDPQHPLFKVDVTQIIEVVHPVYRTERTEVVQQCITRGTYKLMSKAQQRKARAMRSAGMLVITDNPTTHWVSEPQKMLVVKEKLSTTKHVKLRNVEVNAESEMFWGTKTKEGPSKTALKRCKRNIDRLALLDPQMGESANGECWMNTFKHHLKVGSIDILPNKVRLPNLRSAFSRWIPLVDYVEILKFHCKSQPKLKRVVIPTPVTYLEGSRYHIHVGYSKNCSWITVEQLIRQLQTLLTSSKYGEHFKRAIVGGEPEDKFTPVVPIVDVETERAKSSLAKWTTAQQRYMGSIRTRINSQAEKHKIDSEKKIWIPMRHDTMDMLTPPYLFENGLRNNEVQQVGQVLGDSVDRAGNSSGQSSQCQQQNVALASEGNNDNVINESVRSIQNLVTANMQLQEQCKLLLASHEQAIMDSVEHGNLEIQKHDVEVSQKPSTRKSDSQRNLQKFSLKKIVASEEMSRTLGRGWRKSVTSIGVPIVSASIAEALNQVVQRGNTSWLDVGISGTLLKQCTLFATRTFQAYCSYKLARNVLTLTVGELYDNVKSYINSIMGSTDPEVTGFLSQVRSAPSMVKMAILLTMFAISVKLMRKFFKVKNNGTSFTVSGENVSASQLRISAQAQARSTDNMTPTVKKLCSILGMIGLVCCCYDRTTWAYQKDWMDAWITSITYAGASDSIWESISHPFETLHNIAVSGGDRSPETTARLERILAGAGLNAQAQALDEFGASSSVMGQTLQNILDEVESTNVSIVSEMKALPHYHRNATTFNQAARDLVTEPDATYQMLLTAATGTGKSTLFPVHLRSQSQKRVLLLIPLVAATHGVYQRLKSQRVNDIGYHADSISENPNAKLIISTYGHMCVKLLGGQNPFDQFDYILADECHVVTLETVTVISHLLQQREMATWKTVFMTATPFNNITLNSVETEQPVIMQQTEHFHNPKSFVDFLKAGGTERVQTYAKGGCIVFCSTQKETEESAKALKASGVIALFYHASNRLEWDSFAKKNERSMGQLNFYLFATNALESGVTIPMKSCVDFVTKMHPVVGGDRKTITMAPTSISIQEQLQRRGRVGRTCPGGYLYTSVGTPLMYKLDPDSSIKYLLYCWKSGIKCYKEALNIPDECTITFTKEKIGAIWTHDTPPVVTAALVDNFGAVYRNANFFLASHRRNYVEIPHTTDMILPSTLSTWENFELDGNEVSDGTRMRVPQNHFFFRNERVQESWLKLQAAILTELTEAEATKKRDIVIENLMARRVSGHPASKLEIARMIMAKQQVVQQARDTKRVRETLSESISDYSGIFSNFSGIFSVQERLKKASIKANEELDMVIQENESHILFLQDMIKETPEIIPDMALEEQIQHMEYAKAILENGWISGNPQAKLLIMRTTHKNFHDLVTKTKDGTYRMKSYVQRMFDFVKKHPLLIFMSIMMGTSLAAGYFMMSKDSEDDDAIVQDKVFKRNDKAMLEWCLRGKACKCDATHFEAQYVLDSRHYRTILEDWVKFPLRGFHNIQIVNYGTVSKYARALAFLSVCALLANPTMVYNSAAHSMAGNSEYNESVAKSLMHNILRDWNRVPLIDLLVKGIDGSDDRYDQYIHELYTSGGLIAFESDTGKFEGKMSISQYRKDAAKGQTKRSAASRSREEDHYDPRSSGRLKSGIRRAYRQFYNIEDSDVQEIILTNKKGAPILKIGSLDELNQHVDLLKFSDPELYELYLHARDKLDLDEPESSSGFTGKWGDYAEDDEFMKMISALDSLTKQASEEAFIPVQVKLRDGRTVQANVARYWQKDYPTGKSVKQWAQTTWAPPQFTALRERVGKALELIPESRPIHLHGKVPNGTLIEFQDAMKDLHEKTAVKAVAEAKIGDTQFEADPSDVTSRVGVVMVKTSANAEWESWNQCVALNNIVIFPHHYTLKDGNNLRFKFSSSDFESTCHIVDGYNGLDMAWAPINVKIRGLKKKVCLGTPRNGSYLWHFSMINQGKDLPEARLMGYSSVTKVQEESHPSFDWTHTVSTQVGNCGGPFVDKHGVIVGYHTGAFQLGQFNTFLGLSAPLIAHLTKLDVKPSAQPQSKMIWREVDFYRSPNYLPPTINNQEPIPEEWRYPEGKSVYPCVDPGWMGSRLVKGSGFRLIGKMQRHVEYSTKISLNEHFDMWMSQEKTQNELTRLNKNRVEKGLEKAFISHTIAAQNKEAAIKDTSKYARTTLGTYSEPLLKRATALTIQMLEEHIKLCKRQPLDLVYGDMEWNTACGAQYNGLKSAFRDQVVGIENMDAYGQYCWERFNVPTDQYKPCIWTNSLKDELRPIEKVKENKTRTFTAAPIEFVIGAKQAVDAFNHQFMDAHLKLPHTVGINQWSGGWHKLYKKLYGKNFVYSSGDGSRFDSSPCFYMFDALYTIRTYFADPEIHQVLENIYLEVCHTPIVLHDGNVVMKNHGNNSGQCSTVVDNSLIMMILCCASYLEHTPATMHSLDAIKSHWHFCVNGDDYIGGMSPLLASHLTKEKMAKTFSDFQFIYEWSDYSPSLFEQDYMSLKFINIVERKGQTTGQQLIAPWREASRQLSTLAHTSSGAPEIKLQVALTERVKAWVDKDLFDFITEYCRWLVEYFDRFTNTQAWNEAKKLWWDEQQIFNHYFSFESICNAPYSQIVNETPDEFFANGVRESRPLRILRDGIKFGVAVTAANYLGPSDHDVPMIANTMLNVAKIGLANSTAERIDRMLFGKENPEHSRADSLVVVKTEQTDATICLRTHCKCQAQHFDGKYECWVSSPSVAIKMFATLKPRILSTTKFVGVKFLPKILRAHVWALYLSGFSWEETMQIVQSHYPGEKQQRKADWFLQQLLKELVLIFKVKGSKFIELGEHAQVQGKTQLDSTQVDMDPNFNAAAYAATLRGGPHWGTHNSQGLFDAIKVLNPNAANVDIGNARTAVQREMQRLIAADAPRQQPPPQVGGGHQQPPPAGGQTQGQPGGYTPSQAFTNKFGNIMAEPDAPLVLDSQATMREVAQIEAAWARLLEVQSLEGLGSFWNYMFSYVGNNGTSSGGDPRDYIPAGNGRVTLAQLKSKAQGEQWRRYWRSHASDMRDFLRLLQASDRPLPIRWARNNGIKDANYEIAFDFADALPDLSAAQMSIILAAKNLAVRRGQGQMLNAGTKVGGRSRTETYDQAVRDAADVQFPGA

SEQ ID NO: 1525 - protein, 2031 aa, Black grass varicosavirus-like virus
MDTLEHAEANELEDDDYFLPDEGPLHDMHLASAINLDQIQELMYPGTIKYKIDIPYYLRDEYMLIESLCKGDKIKMELGMLAPSLKLSKPGGELSTMDLPAYKEIGNLVCQALRNRDIMIPISMNDVALKLPGVIVYRSWGIAFAELLKIICTRAEVMRGGSQPVYQGTGIEAGAAHCQFQVNGNWYQIVARKNLSTLYDRQENVMYIGNIHSLLLLMDTIGQRICLMVANQIAELYDTPGWVDQGKIDQILSTGDDILEEMGNDGYETIAMFESLVIGKVLRATPDDITECHKFLYNCMDEVENMLLNSAMRGRIIELVHRWLAIFDSLSIKELSNVFCLYRCWGHPVVNIYEGMEKVYDIGTEEKEVSPWVATDILCQFRKTFLINYYEKHHYYPNVLISEEVENSYVAQCIKKGSSIEEMYPTYDTKDFLGIEIQKIWDIPITFDLCHILNDKAVSPNQKELTDSVVRYQNTTGGQNRRGLLRWLRGKSLNCREFLREIDQNGLPEDECIIGMYEKEREIKIKARMFSLMSERMRYYFVLTEDLIAKHVLELFPAITMKDSQNVLQKKFWTVGGMGKDSTFDVNINIDFSKWNSNMRNELTQPMFQQLDKIFGYTNLISRTHEIFESSFVYSSSGKYVPTVKFGKLQEDPPMAYRGHKGGFEGLRQKGWTVATVCALSAIAERRNVRTKLMGQGDNQIVRILMPTQRWKSNELTIKEMIQNAKQIQKAFVTDMERTFEEAKLPIKVRETWASTRLFMYGKMILHDGDAMPQWFKKVLRSYALTNEGQVTVAGVVGTIATNMASAAGLSEMPDVMYLIFVAMTEWSLGYLLEYHPFTRKCILREHEYHVKIPGAHRGRDYRVRSVNKRRLVVSMILIPTAAGGSVTVPLPGFIMRGFPDHASEAYAWIKMLAEVKSPYKTMLKNWYTFIGNDSIQPDMLIQSPSSINFLKPPTPSFQGRMNVRELLLSGEFDQNQFIKEAGTILGVFDRKKVCSAMLTDPMNPFITSEVYSTYAHVYIDGVIKRVENTSTIKKLAQKVKTKTQVIKAMMYNEHNFIMFISWRAMKRGTIDYDCATQQARMARNIGWGRTITGVTTPHPVELGIGHICKGRQDECPPTDYIYVRINEKGEFVPYLGSRIKCKVVSEQDIDARREPLIAVGSRICRYSSWLGIGPNLMEIVEKNLAVVCDTSVYDKFIDDDPKGLLSSGSIDHRFTPAGASEGVFINYAPQIGCNVYMSSDCMPTYGRGQTNYTLHFQALYCWLQYISSRRAESVFMHHHIECEDCVVPTTDEVPDIQCPFPYFDNIYPPRVRDSISRALGFIDRKGGLDIMSNVRSLCHEAEPGMFDVRQLQKGVMWTLAIKIGFRLYHGGLFGSDDTRVEDLQEYPRIYSYKLYRDTLLVNVAHVMMMLAAIEMDKAPDGEELAKVRRRATDKLLSKPIGSFKGLGGLTLGRTDENPDNSHLFMTGSFPETVFSILNTSKTALIETIGQIGRLSIEGMGHLPVAKGSLSNKQFRFLIMMRCLLECRNSHYFQHFQKIPEDEPGHPADPQNDVYRMLVKTPVLDMSLDKMVKSLAVINERKTLPIIEWNNISFESTEVICRTGTPRSIFIGNRMIVEQNSRREYREVTLPTSSIYKWAGILFHKPLKRHIIVLGDGTGGTSLLVKTFNQDSTVYPCSYLETHKIIPQDMECLMPQLSRGYEGISGRVLLNVPDDIKDPLWSERMSSEINDMGVERTSIVCDIETVGLCVLLDAFRSLPQGVQVVMKTYAKDILTNIMSIMGLNQVEVGFSPHLNQSNHEVFLMGHISQNSFPDPDMMINQMVKLYGKVRADPRSRILEEMRMINKVFKPLKNTSVSLSLAHINNLGITMTREILQLDGLEIWGYALQFVNRHYVDPSHRAFLADKKTMNRKRKRDLTRAFRILLGVVVNPGYLDIKRKWGIRTPKEFKPRGMNLILARDCDDMGVKLTKKDKLASECLHCFWTRKMRKAPLDAPDPPGEDWMESATRVRSFASSLSEHSSHDYINVIETE

SEQ ID NO: 1526 - protein, 2338 aa, Maize suscal virus
METFLDEQFDDMLSEFEQARLSRFPASHHSSALTYYPQRHILSLMSPNCPVKPTPLLRAYCDAVNKVSDLLGGGCDATDNPAPVYSYIFSQTTASSPAYYDPDYEDPYLLDSLRAASDAVLEDIEAIESHHPGFSLDNQKLRLLRKVSSRLHASCKQIFAVRRMLEKVRNQIQKCHIGVDHKLMPAVRLGNLSIHTVRDLIFVAGLQPFPMRIHILNYDQWLMIYDTVCCRAMVKVATLWNEELRTDNIPSWEIVSSVYKWGDALLTNYGVSAYAIIGEFESIVTGVLITFSDTDTLGLGASFVNSIMENAQEQSRAYNIPANETLKLISLLRTVESVNWLSELFGLRKHWGNPMVDARASGKAVQEKVDEVLPVKGTALVKLLASFNRMVTLSFISQHGQWPDGYYLSNSRDCPLKRAFESRSTRIPETVEGHRHEDWACFVFLPNCILDSYEDDLALISDKAVSVYREHLDSVYVRALCNKQSQGTVEEDRRLMLEYLRKQHMPILDIFKIVMTDAVPPRWMANCASMKGTEMKHLKARIFAVLTYEMRQYFAASEDILKNNLFKYNPHQTMTMSETELLTRLKSLTTQLDPNSQSRQLSVIHIVDFSKWNLRMRYTNTCLVFKSIDDFLGTPGLFENSHPLFSDMLNMVSDPFNPPALGVEETESDTIWRNHHAGWEGQRQKGWTILTSALLSDLERTTGVHSEICGQGDNQALLSKFPVPTIYRNPEEWIKSDPTEVRKVLDDFYLRLEKECEAVGLKIKTAETCRSLCFFNYGKRLYFKGSELSMTLKRFSKNITQPNDSYPTTEAILKTYEGSSYAAGLYSHPSLLPYWMSKFSVAHQLFNSFTNNQLCAEAPVQMMSTFGFPINYRLISTLMKIPASLGGPPQQCLADYLLRGHPDPLCTDLVGLTLKSKAGCVISKKIIRLAQSGKWFSQRTLTRDSLIKSPYSLNLRVPLSVRQPIEEAVLPAVRAHCNNNLVKSLFDSSMDDDERYILDSLGLMKPFHPLVANDIYSRTLPGRRQMFISGLANTTSLGRLIKGNSAFPLIYKVMDLEMEQLKSWIVQLTELLGLPDNDDIILPHHILAQQLREKSWNTVIEGITVPHPLEQFMLTLSKSDVCTNDCYTVEPEHIVLVQHSEDVVVSPGVDRDHITAARSKKGSPYLGSHIGEGIVQKQLICLNPDTSWRDVIRLNTIKRWVAPEGSRLRLFMNGIISSRTNISRAYIDLATGVPSRLSYNHRASLMGSINSCSISSTTNMHTRLYLSSNRMGDYSHGLKNYHMPFGPTFLCYQTLVCLIGIFSPEKWAFPRNVYHIHVRDSRVPPVYDGGLELEDLTVLDLKGHPPTILRCLASKLVFEAAPGYASFGFWCEFETASRTDAKYGYAQQLTGGLFIQETVVRESITHDRIGSFASRPAVISIGDISLIEPSLFLRSIAWGMLLLAPMHLLHFRGKYAFKVSCVEYVNLFSRAFWSSFESPMSNPRIIRKLGKHVALMSSHSLGRLDSGIIPALQIIIVEEMWCIIHSIATYFRRGGDKPNIPPIFAPSGSAALLLTSRVIEMMVTIRLVVGNCSISKIVGFPRDFSANLMSVPQPISAAALIVIQHDFLELQRHLKLPLRDMVIPRVFSTHYPWVDILRKTDSVEADDEDPQRQLVLPVDFPQCANVVEFRIPENPVLETTPQCDCKTTQRKRDLHDECFFSLSGNYSKSHLKILELIFSFHLPIANLCVLGSGTGSEACALSNYLDCRQVYVNCYHKLTDFSPHAASTYVPPAFRSDGIVTKLVSPASAVLSLSDLTDIRTADAIYQHLRGIATTGIICDAEIPSAATPLLYSQIMHTIVAVVRKKASINWVLIKVPIFCVHKLLGLAAPLAQAFHRIIFAYPDFGKPHSSLVYIVATIRAKATPIEENRLPTVMLEDEMLREMLASISSQNHCRLYEMRVADRISRLSLNLTLPQSLTVASNRFVQGLILTEDEISDPEQVIKVLKAVRQGLLTSAQKVVETHFRVHNEITMPRSAVLSADLGTLHGQLNNTYLKVAKCDLLLELLHLIHPTLEQIKNRVYSWLATAHSYRMRNRNFNVYINQTRFISHDSRYLFEILGHLMKRSVPTVGLPIHMDYHLFGSRTLRPKQLIVPCPIGVCRSPSGRTSKWKWQKRSEILGWAISLTLTNLPIAVEDHNSFSLDFLHEKGILEDVRMMASLNPSRIEVPYFFRPNEMALDLLAHDRLFLVAPLNSFSLLRSRYTTVEPYFVPWSGAPLAWCLFYLEERNQIDSLIVDEICLDDTLSVNTYVDTDSMSCRCLSCKTEEVLGERFSLNTNDLDFLCSLGSIETVYDSEHAL

SEQ ID NO: 1527 - protein, 679 aa, Horseradish latent virus
MKPQPLKTMEHLLQKTQIQTEQVMNITNPNSIYIRGRLYFSGYKIVELDCFVDTGASLCIASKHVIPEERWEAAPRKINVKIANESTITLDKICRNLDIIIAGERFHIDVVFQQESGIDFIIGNNFCQEYSPFIQFTGHIVFTMKDQYQVPITKLRRAFKRGIPGFLESMKKRSTAQQPEPLNISTNKTVSLSRGRRFGEKLRITQERMVKIEELLEKVCSENPLDPEKSKGWMQASIKLSDPTKVIKVKPMKYSPMDREEFEKQIQELLDLKVIRPSKSPHMAPAFLVNNEAEKRRGKKRMVVNYKAMNDATVGDAYNLPNKDELLTLIRGKKIFSSFDCKSGFWQVRLDEESKSLTAFTCPQGHYEWNVVPFGMKQAPSIFQRHMDEAFKVFRKFCCIYVDDILVFSDNEQNHQLHVAMILQKCYQHGIILSKKKAQLFKERINFLGLEIDQGTHRPQSHILEHIQKFPDIIESKLQLQRFLGVLTYASDYIPKLAQIRKPLQAKLKENVQWRWTPEDTLYMKKVKKNLNGFPPLHHPLPEEKLIIETDASDNYWGGILKAIHIDLSTNESIELVCRYASGSFKPAEQNYHSNDKETLAVIRTIQKFSIYLTPVRFLVRTDNTHFKYFLNINYKGDSKMGRNIRWQGWLQNYVFDVDHIKGTNNCLADFLSREFNGA

SEQ ID NO: 1528 - protein, 358 aa, Bean latent virus
MPLPKRFRLNAKNYFLTYPQCSISKEEALSQLQRLTTPVNKKFIKICRETHEDGQPHLHVLIQFEGKYQCSNNRFFDLVSTTRSAHFHPNIQGAKSSSDVKSYIDKDGDTIEWGEFQIDGRSARGGQQSANDTYAKALNAGSAEAALQIIKEEQPQHFFLQYHNLVSNATRIFQKPPEPWVPPFPQSSFNNVPLDMQQWADDYFGRGAAARTERPISIIIEGDSRTGKTMWARSLGSHNYLSGHLDFNSFVYSNNVDYNVIDDVAPQYLKMKHWKELIGAQKNWQTNCKYGKPVQIKGGIPSIVLCNPGEGASYKDYLDRQENAHLKAWTLHNAKFIFLNSPLYQTSAPVCKTQGSPT

SEQ ID NO: 1529 - protein, 354 aa, Rice latent virus 1
MADPSTSHQFSVRTKYFFLTYPKCPVDPWELLHYLLTLLHSRVPIYILVTRESHKDGSFHLHTLLQLSNRLETKDSRFFDYQSYHPNCQPAQNCKQVRDYITKPGTVSIAEWGEFYNAKPFSKKTLKRRAPGSDTKDTKMRKIISSSTSKTEYLSMVRQTFPFDWATRLAQFEYSAEKLFPTTVTPYASSVPTDQLRCSEQLSQWATENIKTYTVCEEDAPTTARRYTSLYVCGPTRTGKTTWARSLGKHNYWNGLVDFTTYDPTAQYNVIDDIPFKYCPNWKQLIGCHRDYTVNPKYGKRKVISGGIPSIVLVNEDEDWLSQCTPAQTKYIESNCVIHYMYEGDSFFKHPSGA

SEQ ID NO: 1530 - protein, 382 aa, Rice latent virus 2
MTNTESASEQPHNFAFQNKNVFLTYPRCSQEPHTMGLFLWNLLRPYGVLCASELHKDGTPHLHALAQTRHRIRTHDSSFFDNMDYHPNIQGTRNPKAVLAYILKHPTGEWHKGSFRPRGSFGVPPTGNGEAGPSTTIRRAAGDSSSSAEGGNTSSELANKRRRMTKDQIMADILRSATSRMEYMNGVKKWFPYDYCARLQAWEYASQKLFPDPPVTYEPPFNDSMFHCHETLTEWAAENIYHVTPQARPISLYICGPSRTGKSTWARSLGRHNYYQNNVDFGMYDPEALYNIIDDIPFKFCPCWKALVGAQKDYTVNPKYGKKKLIKGGIPSIVIVNDDDDWPKAMTAEQLSYFESNCIIFNMSLYNFSFISDTGATAPERC

SEQ ID NO: 1531 - DNA, 38 bp, synthetic construct
  source 1..38: mol_type = other DNA
ccactggattcagcgaagttatgcgtaaaggcgaagag

SEQ ID NO: 1532 - DNA, 20 bp, synthetic construct
  source 1..20: mol_type = other DNA
ctgagtccagctacgagcag

SEQ ID NO: 1533 - DNA, 19 bp, synthetic construct
  source 1..19: mol_type = other DNA
ccactggattcagcgaagt

SEQ ID NO: 1534 - DNA, 21 bp, synthetic construct
  source 1..21: mol_type = other DNA
aacttcagcgtcagtttacca

SEQ ID NO: 1535 - DNA, 23 bp, synthetic construct
  source 1..23: mol_type = other DNA
  misc_feature 1: note = 5' 6-FAM 520 fluorophore
  misc_feature 10: note = internal ZEN quencher
  misc_feature 23: note = 3' Iowa Black FQ quencher
cgagggtgaaggtgacgcaacta

SEQ ID NO: 1536 - DNA, 20 bp, synthetic construct
  source 1..20: mol_type = other DNA
cctgctgtccatctgctctc

SEQ ID NO: 1537 - DNA, 20 bp, synthetic construct
  source 1..20: mol_type = other DNA
ctgagtccagctacgagcag

SEQ ID NO: 1538 - DNA, 20 bp, synthetic construct
  source 1..20: mol_type = other DNA
  misc_feature 1: note = 5' SUN 554 fluorophore
  misc_feature 10: note = Internal ZEN quencher
  misc_feature 20: note = 3' Iowa Black FQ quencher
acaagactgacagggccaaa
